United States Patent Application Publication US 2025/0376534 A1 - sequence listing, part 2

SEQ ID NO: 2963 - DNA, 1000 bp, Agaricus bisporus virus 6
  misc_feature 1..1000: note = isolate AbV6-003 segment RNA2, partial1
  source 1..1000: mol_type = genomic DNA
attctaggaattgatgttctttcaaacaagatttcgattggatcattcaaacattgattgtttgtttgttaagcttgcgcccatcatgttcgcgtttgactgttaattcttttccctggcaacttgacgtcttgtcacccggttacgtatttatggcttgccttgctagggcgcgtccgcctataaacgacttaagcttcggtctagatttgctgaaagtagccctttcaccatcactctgccgtgcgtagtgagttttgtagaacattgagtgtttgagcccgtactcatcacgtgcagtcttttcaactatgctaccttgagttgtaactcttgatgctctattggaggctgtatctcgaaggctatatacctctgtatcctgggtgaaagtacccgtccctcggagcatgtactaatttccttgtgtaagatgttgctcgatcaactctacttggagagtagctttcattaacctcttggagaagaacaatgtttatacccattctttgacgttcgatgtcgatgacacaccaactctggtgagtttgatactgttgaactcgtgagtacgtctttgatgtttccccctcagaaagttgcttcaagttggttccggttccgcttgccttttcaaatcatctttgggtagacactggtgtctgtaaattcaaactggtggtaagatccggtttcccaaatctctgtctattggaggtaacgattcatgcggtgacactattagttttgacctatacccgtttgtaacgtttcgatgtccaagacacaccaactctggtgaactgaatcccacatttggttcgtgagtgcgttgcagatatctcttgtcaaacttggttgttcatggcaattttcacatggtaagattgtgagaagacccctgactcaacagtagttaattgcgccgcggttccgtattttcatctaatttaccctactttcatgatgttgaggagtaaacctcctcttttcgtttata

SEQ ID NO: 2964 - DNA, 1000 bp, Trichoderma atroviride mycovirus
  misc_feature 1..1000: note = strain NFCF377 structural/gag1
  source 1..1000: mol_type = genomic DNA
gtacagatccgatgataaattccggtgatgtttaatatagcgagtttagtctcaaagctcgtcctgcggatatacaccagctcaagggggtatggactgcccttgtaaagtctacaattctagaggagaaggtgtaatttgctaacctccttagataaactgcctcatttatacatcctgtgctcaccataagctaggatggcgcttggtattaaattgagcgcaatacctccctcgaggaaagccgggggcccatcaatggggatatgaaactaggccctggtagcaatctcaccagtaagatgattttagctctaatgtataggcccggacattagtaagattacagggcaagaactatcctagtgggtctgttctcgtcgttgcgtttaacgccggcattcaggtccaggtgcgaggtaactgagattttcgactcaggtgtgatccggtggtgtcggctaccccggtgagctatcgtaacatcctacgccgttagcctcctatctagcctctagtaattatttccactgctatgctaatccaggagtgagtagggatgggaacgagcctttcgatggaataagtccctaaatagagtggcatcctacaaagaaaggtggacagactgacactcgacacagagcaaggtgaatcctgctcctagcaaacagtcggttggggaaataagagtacccaatgatggttcatcccttcaccgggtggtatagaacggcgcgtgaggtaatacatagtattatccacctcacgtatacctacccacttgaagtagggttgttggacgtcccttgaccaacttatatataccgggctgcgcaaagcctttgtcacccatttgtctaatcaagatgccagtatcgcctaccacatcctcatccccattaattttggacgaaagaagccggtagatagttgctatccaagatacactgattagagatctgaaagtaccgagtcataaatttgctgcacgaacaaa

SEQ ID NO: 2965 - DNA, 1000 bp, Tomato mottle mosaic virus
  misc_feature 1..1000: note = isolate CpB1, complete genome.1
  source 1..1000: mol_type = genomic DNA
caagtcactattgggcaattgtctgattttgactttgtggatctgcctgcagttgatcagtatagacatatgattaaagcacagccgaaacagaagttggatacttccattcaaacggaatatccggctctgcagacgattgtgtatcattctaagaagatcaatgcaatttttggaccgctcttcagcgaactgacaaggcaactactggacagtgttgactcaagcagatttttgttcttcacgagaaagacaccagctcaaatcgaagatttcttcggagatctagatagtcatgtccccatggatgtgttggagttggatatttccaaatacgacaaatctcagaatgagtttcactgcgcagtagagtatgaaatctggagaagactgggtctagaagattttctggcagaagtgtggaaacaagggcataggaaaaccactcttaaagattacacagctggtataaaaacatgtttatggtaccagagaaagagtggtgatgttacaactttcataggaaatactgtcattatcgccgcgtgcctagcctcaatgttaccgatggaaaaactgattaaaggggcgttttgtggtgatgacagtctgctgtacttcccaaagggctgtgagttccctgatatacaacaggctgcaaacttaatgtggaactttgaagctaagttgtacaagaaaaagtacgggtacttctgtggaaggtacgtgatacatcatgatagaggttgtatagtatattatgatcctcttaagttgatttcaaaactcggtgcaaaacacatcaaggattgggatcatctagaagagttcagaagatccctctgtgatgttgctggctcgttgaacaattgtgcgtattacatgcaattggacgacgctgttggggaggttcataaaaccgccccccctggttcgtttgtttataaaagtttagttaaatatctgtcagataaggttttgtttagaagtttgtttatca

SEQ ID NO: 2966 - DNA, 1000 bp, Cucumber mosaic virus
  misc_feature 1..1000: note = isolate Kirinyaga1 3a protein gene, complete1R
  source 1..1000: mol_type = genomic DNA
aacagaacattggaagaaaccccacaacaacatctttgtccgactctagtacccacttcaatctttctttttatctttcaaaggtcctttgggtatcttgctcaaaaccttcgcatcgaacactgcatattgcttcttaatctcggcaatcgccttttcaccaaaagagtccacttgatcttcatatttctcatagagcacaggcacagtatgaagcaaaacaaaagctatgtagaacaacgtcaagaagttcgcccagctccccagaatagagaaaacccataatccagcaatcactgataagaacttcttgagatcccttccggatgcaatatcccttaacactgaaaatgcccgattaatctcaattctaagagcagaggcaaattgtaaaatagggtcctctggaatgtgcacttgtgggatctttggcggcctcttgttgatgaaagtggatgcattggaccacaagaacaaacccgcgagggcaagtattacgaagtggcaaaccagagtgaggaggtggtactcaagcaattcaaacagaatccatatgactgtagcaactccgagtgtcgatgctgatatcttcttatttctccacagaaaaacatcagcctgttttccgccaccaagaacatggtgaatgggcttttcccttccgaaaagcctgaaaacctttgacttcaaggaatcagagggcccggttttctcgttgtcggaatccgaggaagacgatgaatcgtggtcgtggatcttcccggaaatcttgtccaacaaggactcacccttggcctcctcgtgctcgtggtgctccgccatcacagaatcgccgatcaatggaagcgtctagaaggaataagaaactccctttttcaccaagagagagagtatgtgtgtgtgcgtgtgtgtgtgtgtcgcgtcgtgtcgagtcgtgttgtccacacatttgagtcgtgctgtccgcaccttcttttcagtgtgttagaatacccgaggc

SEQ ID NO: 2967 - DNA, 1000 bp, Strepsipteran arli-related virus
  misc_feature 1..1000: note = OKIAV104 cRNA sequence.2
  source 1..1000: mol_type = genomic DNA
actcatagtaggccaacaatatacttgtcgattctactagcgtcctgtatcaagacaccatcggttgagtaagattatgtctaaccattataaaataatagcagatattggtttgttggaactagacactggaataactagaagagtcaaggctggattagggacaatatccatctcaaatgataaacttcctaaagttagagaaattctagccaatcttatattactatatcaggtacaagagttagagcactggtatcttcgtctagatttccactctcccagtatgaaaaccctaattgatatgtattcagcagagttattatctcaagagcaagtttggtatatgagaattagaaccctgctaggatctggaagtgcatgtttggttaaaagtggctttgaagtgccgactatgcaaattatattagtgaaatatgtttacccatcggcattcatacctgaatagattcttttaaacagggaactttatttataacactttcttttctttacgcaaatttatcaatatacttgcatatctagcagtctcaactggaagtctctttaatttatttatcaatacacaagccagcttatctatatgattatattatgtatcaaatgcatgcgttcttagaacattaattaataaaatatgtctgctatacacaggtgataaccaatgagattatagagtaccattacaaaattgtgtctttattggcaataactagatgcttatctttctgctttaatttacacttagaaaaactcaagaagtgccatctaatagctacaatataaacataagcgcgaatacaaccaatataaatcgtcaccaaaggcttatgcgccagacatctcaaaaagaactcttgccagaggaatcagaagctataaataaagaagcatcagcattgcgagaacagaaatcaattgaccagaatatataattgaaattcaaagtgaataaatcttgcttaacataatctccagt

SEQ ID NO: 2968 - DNA, 1000 bp, Beihai rhabdo-like virus 4
  misc_feature 1..1000: note = strain BHJP58499 putative nucleoprotein,2
  source 1..1000: mol_type = genomic DNA
atgcttgaatcttgagggaactcacatcgacatctcataactatgatattgattgctctggttttgattttatactttgatgttgagatatgcggggggaaacaggccagagtgctctttatagaaaactgaatttttaatcatgcatggaagggaaactgcccgatcctccgggaggttagtgctataggatttctagagcagatcagtagaattagtgttataactttggcttcttgatgtatgttattattcttgttatattacctgtgtactctatatcatactttactctattaaatccagctatccattcctgtaatgtatgcctaaatgtaaccttatagtgctataaaaaaagtaacattacccaacaaaactcggaatcctctttaacaatgaatagtgattttactgatataagctcagaatatagcgactctgctaaaggagacaaacaaactcaatctaagcaactgattaagaaaataaggagaaagttaaagacaagaaagaacactaaacagaaaaaaacctgtgccagaagggacagactcatcagatcaggaaattcacccctatcagctattatacgacagagaaaagagactaattgagaaggagtcaattgagaaacgcgtcttgaagaggaaatctgccccaccgcctgagcctcctcaaatagaaggtgatttatcggacgagttgcacctcttgatagacgatcaatcctccaagagagcttgcaggccgacagaaatacctacggacataaacagccatatcgtgacagctctgcacggcctcggagagcagatcgggaagctatccaagaaggtggatgagatcttggtgaatcagcgcgatcagtggtcagcaattagaggactgcaggctcaggtggctaagctgaacggagaagccgtagagggtctgctgtctccccaacaggaacttcggctagagtcattcaacacgaggaaggctgctaggaccatcg

SEQ ID NO: 2969 - DNA, 1000 bp, Feline morbillivirus
  misc_feature 1..1000: note = strain 761U, complete genome.1
  source 1..1000: mol_type = genomic DNA
tcctaaattacttgttaagccgccacctagggtaaaaacaagcgttgatcacagtaatccattaaaaggggccacaggagggaaattagcctcacctgggatggagactacattattcgagaggagtggtgcaaccccatctgtacacccatatactcaacctgcaagcgacttcaatgtaggtgcaagcaatgtccatcaacctgccctaaatgtgaataataattgcaatgatggtagggtaacagcgcctaactcacataaagatatcgagggtgagtctgaaatatctattcaagatatatataacttgattcttggatttaaggatgattacaggaaattatcaaacaaattagatatggtattagagatgaaacaagacattgacaatctaaaaaagaatagtgctaaagtgcaattggctctatcaactattgagggacatctatccagtgttatgattgccatccctggttcaggtattgattccacaggggatgaggaaaaggatcagataaattctgacttaaaaccactgctaggaagggatcattgtagagcatttcgagaagttaccaatcctctagatgagtcttcactagccaattctccaacaaaacatgttgccaaggtaaacaaaaactgcactcttcagaagatcaacaagaacgaaacatctgcaatcaaatttgttcctagtgacagtcatgcaagcacatcaaccatcagatcaattatcaggtcatctaatctcgatcaggatttgaaaacaaaattgctcacaattctatcccagattagaggggcagacaatattagagaattctatgaaaaggttatgatattaataaagaataagaattaaatattacaaatctacattcattataggttgtaattgtcttcaataagatttggtcagtttcatatatatggttattgatttgtgataattataaaaaacttaggagctaaaggttactcagtcatatacagc

SEQ ID NO: 2970 - DNA, 1000 bp, Peste-des-petits-ruminants virus
  misc_feature 1..1000: note = complete genome.1
  source 1..1000: mol_type = genomic DNA
gggtcccggaaatacccgatgtcaagaactctagaccatcagcccaatcaattaaaaagggcacagacgggaactcagtcttatctggaacggtgacagagtgttcatcgataagtggtgcaacccaagctgtgccagagtccagatgggagtcatcagagcgaaatgcgtctgtggggagtgtccccaaatctgcgaggagtgcaaagacgatccaggggttgacacaagaatctggtaccatagcatcactgactcagcctaaagagaatgactccgagtttgagtatgaggatgatctattcacagagatgcaggagattcgtgcaagcattgctaagatccatgatgacaacaaaactatcctctcaaaacttgattctctactgttattgaaaggagaaatcgatactatcaagaaacaaatcagcaaacaaaatataagtatatctaccattgagggccatctatccagtataatgatagccatcccgggctttgggaaggacatcaaggacccaacatctgaggttgagttgaacccggatttgagacctataatcagccgtgattctggcagggctcttgcggaggtcctcaagaaacccgctgttgataggtctcagaaaagcggaatcaaagtcaactccggttcaaagggtcagctccttaaggatctccagctaaaacctgtcgacaaacaggcaagctctgcaatcgagtttgttccatctgaccatgaatcatccaggagtgtcatccgctccataatcaagtcgagcaagcttaacattgatcacaaggactatcttctagatttactgaatgatgtgaaaggctccaaggatcttaaggaattccacaagatgctaacagccattcttgccaagcagccgtaacacatcctataatcaacatctcatactcggttgaaaacatcctctcaatcaggctattacaaaaaacttaggagcaagggcaactgagcttcacagacaag

SEQ ID NO: 2971 - DNA, 1000 bp, Scaphoideus titanus bunya-like virus 1
  misc_feature 1..1000: note = isolate St_USA segment L,1
  source 1..1000: mol_type = genomic DNA
ggtttgacaaatgtacttgactgaccagcaggtatgaccgatgtatttggttttaaacaggtaggtatgtcaggtgtatttgattgacgggtaggtatgccaggtgtaacggggagtctattttaacaatgaggtggttgctttggctgactgatttttagtaaacgtgcttcctctgaatgtggataagactcaaataatacattttaaagcaaattacacaaacagttttcagcaaatcagacttctaaattctcggctggtccctgaagatatttgttgaaaataaaaatctgtttcctcacatttataaattgggtaaaaaactaagttcaccaatctttttccttagaattatcactaaagtcacaaagacccaattggatatctatcatccttatttttaatccctgttgaattagggaatttttgtatgggaaaattcaagccactccataagttcttaaaacatcagaaaaaaatcaatgtgtactatagccaactatacttacaatattcatgacaatatatttttcagcagtttcaagttttcatattttatgacaactacattttaaaatagcttattgggtaaagaataactggttcacattcagagaatgccaatcaaatgtgtctatgccactagatataagcataagattaagcctgtaaatcataggctaagcctgtaaatcatgggctaagcctgtatcagtgatcagtatactagaccacaaatatataacgttccaacaaatttaaaaatatcaccataagttttagattttggaaaaactaaagaatggcttttaacaaaaacattttattctctagaagaataatttaaaggaaacgggaaaacttgaattcattaatagattaatttttctcttcattagtactgtaatttgacaaaagtgttctgtcattgtttaagggcagataggtacgactcaagcacgctgaggttaaacacaaatgagtaatctaaagaaaa

SEQ ID NO: 2972 - DNA, 1000 bp, Astrovirus sp.
  misc_feature 1..1000: note = SG, complete genome.1
  source 1..1000: mol_type = genomic DNA
ctaaagataagtaaaattgaggaagaagacattaggcaaattgtttgtgctgatcccattttttctagaattggttgtgtatttgaagagtaccaaaatcaattgatgaaaaatagaaccctgacacgtatgggtcaatgtggatggtcgccgtttatgggaggtttccataaacgcataaagcgcttagttgataaaggcaatgattatttcattgaattcgactggacgcgttatgatggtaccatccctaatgaagtctttagggtcattaaggactttagattctcgtgtcttaggggggatttgcaaacaaaggaaaatagagatgtctataattggtattgtgagaatatatttagaagatatgtgatgttaccttcaggagaagttacaatccaggacagggggaatccctctgggcaaatatccacaactatggataataacatttgtaatgtctttttccaggcatttgagtttgcatatctgaatactgaattggattctgatgaattaaaggaaaattgggataagtatgattcacttatatatggagatgacaggctaactacaacccctattttatgtgataattatgtagacagagttattaaaatgtatgctgatgtctttgggatgtgggtcaagagagagaaagtaaaagtttcaaataaaattaatggattgaccttttgtggctttactgttcaagagtcaaatggcctttttgtccccataccaactgatacagataaattacttgctggtttaataacaccaataaagaaattgcctgatattttgtcactctatgggaagctcctttgctaccgcatccttggccataacttgccggatgaccataaatttaaaaattatattttggtcgccttggaggtagtggccaggcacatccgtgctagtggtggggaagaaccctactatatcacggatagcatgctggataggctttggaggggaggtccaaagcaaagtc

SEQ ID NO: 2973 - DNA, 1000 bp, Darwin bee virus 3
  misc_feature 1..1000: note = isolate NT-12 polyprotein gene, complete cds.1
  source 1..1000: mol_type = genomic DNA
gccgcttatgttaagtcagaacggttatggatcttgagcatttactttataggtttaggcccgaagcgaagggtggcgtaatgatcaccgccgtgaaagccagtcgtgggggtacctctatggagtacgtgttccttctaatctgggtatggttttgattaaccagtacacttatgaatgagcaccttgaatgaatgtagagtgaatgtttgtatactatttagtgaagctgtaatttggaagtagtacggaagtagtacggaaaccgaagcctgaagccgaattacagaagtagtagcttagtgtgtgtatacaaaacagtagacatctgtggcttgtctagaagctgagtatcttctttaaatattactcaattctgcgtgttatattatctattatattagtaatattagtagtgcgtaactaagtacctcctctttgagtttgagtctacttagaccactgcagtatcgagtagtaatctttaagaatagtgcaatatgttgatcgattgtcaaccaccgttaagggtaacccttagcctgtggtaaaccaatgcatgcgaaggtctagcaaactggaacatgtgagttggtattccctatacagtgtgccaccccagagagcgggtatagggcatgtcatgtcaacatatgaattttctaaaggatgtgctgcgatgaggtagggacccctctatcctctaggtactgtatgtcgcgaaagtatgaaagtataagaacgtaatataatattcagacgtacaatggtatactttaagcaagtaatactggtgtgttgtacgttaaatttgcttcggtatcactctcacaccacagccgttagtgtctcacagtggagtagggaatctttatttatttatttattgctgattccattgctgattatactgctgcgctcttgctaatttatttgctgatctatttatttatttattgctatttattgctgattatttattgctaataaatcatataca

SEQ ID NO: 2974 - DNA, 1000 bp, Picornavirales sp.
  misc_feature 1..1000: note = isolate RtNn-PicoV/HuB2015-2 polyprotein gene,1
  source 1..1000: mol_type = genomic DNA
ttagttcagtggaaagcacaacaccgcttcccccgattatgtgacatcaagtaagtgggcggatgggagcccctcagaatccccgtctcccttgacgggtttgacttttaaaattcccataccggacgaaggcgcttgcaacaagtcaggtttattttctagaattcttgtttttcttaaccctacgtgatctatgcgtagtgggcggtttagtgaggaaccgttctcaggtgatccccgcacgcttgtgcggaactttggacaccacctcaggtcaggtgagacgaaggtagtgtatcctttctggaaatcttgtaatgaaaccctaacagttcatcctcttggtataagctgttcccacggctgaaacttgaggctctgatttgcacggaggctgtggacgaacatctggtaacagatgccacagtggccaaaagccaagtgagcaagaaagtccccttaataggctgtacccacggctgaagactgggatggactgcgttcaccacgtgtatccactttaagtggctgtttggttagtaagagcttgatggaaggtttggacgactgctataagtccacttgattggtttgtgtaggaatgctgggcaggtacccctatctagggatctgagctcaggctaattgtctaagcaaacccaaacttcttttcccttttttcttttcattggtgacgatcacaggagctatcatggcttctcaggcaattcacggtgtctataatctcccaatggattctcttgaagctttcaacatgattcgcgttttttaccgcgataaccaccttgacttcatttcttactgtgcctcagtggtgcggacctatcccgcggtgctgcaggagttggctcaactggttcgagacccggaacgttatgttctgttttgtgccttacattggcagaacaaccatgatgaaggttatgagactgaccctaacccggaacctatggaccaagatgaatctggagatgaacag

SEQ ID NO: 2975 - DNA, 1000 bp, Picornavirales sp.
  misc_feature 1..1000: note = isolate RtMrut-PicoV/JL2014-1 polyprotein gene,1
  source 1..1000: mol_type = genomic DNA
tcatgtgtgtcgcggtccactccctcagcaacccgtctttggacgtgggtactacgatagtgccatccaattcccctaaccttgttaccttccgagcgacctccaacacccgaggtgctcaccaccctgtaaggaaaaatgaaatttcgtctggtgctggctaacagataagatctagcattttccggcccaggctaagaaacctctataaagtagatcgataaacttaaattggcgaactgtacaaagaacggtcctctaccttgccgccacacacacccaaccctaaaatttggcctttagtgtgtggccccttgtgtatgacctcaactcttgcgtacacgcggaatttaacatctttccgctgaaaggagttttcgtgcctccccgattatgtgatgctcgtcctttgctgggcggagcaacgcacgaaacaagccttttctttactaatggaatccaattcccccggtctaagccgcttggaataagacagggttattttcaccccctcttcttctactctcacagagctctattctgtgagaagggaatgttgcgcccctccttcttgggagctcgcttggcggtctttccgtctctgtgcaagagcgagtgcgcaatgtgttagaaggtgaagaaagatattttgggactaacgtttgacacggaacgaaaacgtctgtagcgacctcacaaaggcagcggaacccccctcctggtgacaggagcctctgcggccaaaagccacgtggttagcagccacctttgtgagcggcgtgaacccgacgccacggtttcgttgtgtgacactcactacccccattcggtctttcttaagccctaacacaggtccaccaagaatgtcctgaaggtacctcttcggagatctgatcaggagcttcatgccggtgctttacaccggttcggaagttaaaaactgtcacagtggacccaaatctagatggttctagatttctattggttttaaaatttcatt

SEQ ID NO: 2976 - DNA, 1000 bp, Beihai shrimp virus 1
  misc_feature 1..1000: note = strain BHBJDX17672 hypothetical protein 1 and1
  source 1..1000: mol_type = genomic DNA
aacccgcaccagtgctgtctattagtttacaaagtgatcgcttggcgtaaattattagagagcttgcattgctctcctctacactttctttcgtagagtcattttatttgtccgttgaaacgtattaaaggacctattttgtgtctaaggtcttgtatatgtgtgtggttaaattcatcaaaatcttaactatcactattatatgttattgtcctttgttctatgttgtatgaaagtgtttgtgcttatattcttcaaaacacaaaaacattgttgttgactcctatagtcactatatgtgtatgaatgttgtatgaatgtatcccggattacactaaatgtacctgcttcagcatacaatggctgtgtgtagtaagggtccagcggtgctgcccccatgatagggaggagatttgcttgtgtgtctagaggagtttgttctaccggcggctgaattgctgcgtctgagagacaacttcttgaaccaccgtttgcatttggccttccttgagggatgttcccgtcacgcccggaaccacctgtcctgtcgtatttagtgtgggaaacagtgtaagatggcgttaccagatcgaaactggacctcagcacttcttcgctgagaggctggttatgcaccaccagctaaacaaacaacggttgttcttactaggcactctgtggtggagtagccgaggcgtaggaccattaacataattggagcatacaggcgagaggcccatgttgcgaggtctgtccataggggacctcaagacatcggataccaactctcgggctaagttcagcaataatgcacctctgccggcagtgttctaggcaagtgtcacactccaattccctgttattgtaagacaactaaccttccacatattgacgcccgagcccgaagggactaacgtcgaactgtgagtgcacacagtaaatctagggatctttgggtgagctcccgttatcagctcaatccttttctcatttcgtcacc

SEQ ID NO: 2977 - DNA, 1000 bp, Beihai mudskipper astro-like virus
  misc_feature 1..1000: note = strain BHFishC1881592
  source 1..1000: mol_type = genomic DNA
tttaaaaatttgatgtttttactgcttctgttaatcttcttgcaagttcttttcttcttttactatctattgcatgtggacactggagaactgggacagctctatcctgatctcgactagcctgttactactatcatttatcttttcacctagatcaacaacagtggtagtactgtcttacacagtgctactttatcgcctatggcagacttggaaaatctttgcaagcaactaaaagacttgacaaccaaggttaaccaaattgcccaaagccaaaaacaaacagacccaaaacaacaaagacgcggaagatctaggagccgtagccgctccagagaacgcaaaaacatccgctactttgacgaggacaaggtaaaacctggggatattgtacacgttcgtacttgtccaggtactattactggtaaacactccgattgtcagtggaactacatcgaaatcaaattcccaaagaaacctaaaacagagggttcaaactaagtggtcagaatttgtagccaaacataatttgactgctaccaaaaacacaaacggcaaaacttgtgtcttcctctgtgacgcaacctattgtgacaacgacaacacagagttccaaaattggcgcataacaccaaaccttgaactcttagtttattcgtcaacccaaatttcaggtgggcgtagaacaaccctacagctagcctgtaaaaactactcttgtccttggcgagaagaggttcaacaattacgcaataaaacaatagttagacaccaaccgtgtctacccaaaaatttaactcaaaaaatcttaaacggctcgctttgtaccggtctagaagacggtagtaatctgatctgcgtcaaaaaaccaccaagaccaagaccaacctctctcgcgctagttttcgctagtacgatccaaatacaaacaacaactgtagtgacaaccggttctactactcaaataaccacctcacaacagacaaccaaactaacaaca

SEQ ID NO: 2978 - DNA, 1000 bp, Beihai picorna-like virus 26
  misc_feature 1..1000: note = strain BZL93356 hypothetical protein 11
  source 1..1000: mol_type = genomic DNA
gttgtctcttttgagacagattggcaaccaaacatatatttattatattactactcaagcgtagcccgctagagttaatagctgtcattaacagcgacccctcggcaagaggttaactgtccaaaatcgaatctgatcgaggaagaaatccaaaaacagacgtcgctaacccgctacgaaaacgcggaattattatcgtaggataagaatcgactctatgtcgtgtgcgagtccaacggttcagattacatatgtttgtgacatgtgcaaattcggttgcacaacagccattctttgtaattcatcttattaagaagatggaagaactccctcctatggcgccctgtaatggggattggaggtactctagatttggaaacctggagtgaacgagaacggtttggagcagtggccttttataggtatagactccatctgtaattagttgaattcttagaatcagcctgtatttgatcttacttgttttccacgcaagtattgcagtataggtgctgtccttgtttgacataacgaaggcttgagttattataacacttcgaggaaagtataaagactttattaggtcagtggaaagatctggcgctgtgtttggggttaatagccccctcagcatcaatatagcaatgaagttacgaacagccaaaattttaattccggactttttgtcacacccaattccggttgtggtgatgataaatcatttgcaagagttaaatttcagaagtctaaggcttctaagcttcgtcagaagggaaaggatgctggcaagtttggcgctcccaaggggaggcgaactcagatcgctcagcaattggataaggccaatagggaatataaggcaggtagatataacctgcaggctaatagtggcatcgtcgaggaccttgagaaggtgcgacggagcctcgccggttttaaggcttcaataccgaagaagctcggcaatatttttaacgttattgaggacgtaatattacat

SEQ ID NO: 2979 - DNA, 1000 bp, Beihai picorna-like virus 28
  misc_feature 1..1000: note = strain BHZY60695 hypothetical protein1
  source 1..1000: mol_type = genomic DNA
gaatgtgcaagcacgaattcacctcctgcttgtatgttttccacgaaactagatttttggcaaattagcctccatcatgtttcgtcagcccttgagtaacgggtgcaaatggtataaccctggcatgttgctcaccccaaacccgaccgaaattgtcattaaactaatgtcgaccgaaatgtcattaaactaatctaactatcttttgttctttataagattttagatgtgcatctcaccttgtagatgcttttagccggttttaagaactggcaacccagccccctattccgactctttaagagattaattttagatttggaatgtttttgcagcagtttagctcatgctgactgtttgccccatacttttattagcgtggagtaatttatttaaatcacttgtgaacgattttgaggaatcactgtctagaagatgtcacaaagcgacttagtcgtagttttgctctttacttatgatatattaccgataaatttgaagcatttaaaagtcccacatcagatgggatggtttcgatattgacctctatcacttttacgagtatgaagtgatcgaatttcatgtcatacactgataaaacgcatatctggcgaattgcgggtgttagtgaagtttgtatatggggcctcgtacccccaggcgacgagccgaatacgagtatataggttggttaatttattagcccatatctgcgtgacctgagtaacaacccatgcgggaaaagttacaaattgccacatcgacgtagatctccgcctattggtcaataagcggagaaagtatttatttgactactaacaattatcaacaactttttgtaggatgtgagaatttatcagctcccatctgtgaaatttttgatagtacttttcttgataacactcaagaaacactttttggaccccgcctttgtggtcctcgtttatgtagcgatgcgtatgatcctaaggaatatgcgcgtagcaagtaccggcgtcgt

SEQ ID NO: 2980 - DNA, 1000 bp, Wenzhou picorna-like virus 12
  misc_feature 1..1000: note = strain WZFSL74240 hypothetical1
  source 1..1000: mol_type = genomic DNA
ttttctaacttaaacaagaaaatgccgctcaacttgatgggcgtcattttgttgtcagtgaacagagttcagccaactctatgtatcgcatcatttaatgctctgactttcgggtcatcagatgccttttcttggttatttgataagtatgctatagatttgcgatgtattgtatcacaagagcgctatagatttgcgctgtattgttgacgtcacatgtggcggtaccatggttgaaccctgccgctcatgtgtattcagcacgtcacgtacgtctcgcctgactgcttattttaatgatatagtttgcaaattgtcttttcagaaggtaattatcagttccttgtccaaaattctgattaaccttaggagattatatatctccgcacactagctttactaggtcgagctatttctccccttcataggaggaaaggacatctagactttaagctctttggtcctgagctatttcccgatgggcatacacagatgtccacagtaacaactcgtaaaagaaataaaaatattttgaaaacggaccattacccttacccttgtaacaaaggaactccccttctcaaatttagaaatcccataaaaatctttaaaacagaaatgtaaacaagatccacctttgttgcagagaaccatatgcttgtgaggaaatacactgaatataaatccctaaacgctgggtttcactgtatgagtttcctaacctacacagtcgagagattgtgggctcaattgagtttggttctagacctaagcgcccctcttactagatatagtttgcacttgaggaaatgcgatatgggaaagcgtgcacttacccctgcgaaggaagggtgcatgtgttggaaacagatgtgtagaggttcataaccactcacatgccatacgtactgatcacggtaagagtccgagagctagggtttccccctgaaagtgggatatcccgacaccaggagaaataataggtgataatgtgaaagcg

SEQ ID NO: 2981 - DNA, 1000 bp, Sanxia picorna-like virus 13
  misc_feature 1..1000: note = strain SXXX34014 hypothetical protein1
  source 1..1000: mol_type = genomic DNA
ccatcgagctgtaaggagttagggaaacccctggcagtttatcggtcctgccataaccaaataccgacaccccctcccttcatagtttgtagatattttcaacacgaagcgttgagaacaatagtataacaccatcgcgagcgcactttgtctgtgctactggtcttatatgaggtgtttatacgccactgttatagttttagagaattgttggaattagtggacacatgtccacatgcacgaaatactacgtgagtgcatgctggcttgaccccaaaaacaaaatcaaaattataaatgttcttgccctttgtcggtttagaacatacaaaaatcgcagataggtgcctcttggtgacttaatcagtcccatatcgtactgttgccatcacatatcaatcgtaagtgagacagcgttgctggtggctactctagagaccagcacacagcgtaagctgttcaggtgtccactttacccgagagggtatgtagcagcgattgttgttgtgacacgggcgggtacacctgacttagtaaggttccgattaactggaactctgaaacgttagccccctggaccattagggtcgtgagggttccatgcggagtgcttatcactcctgaatggatatggagcattcacagaagccgcggagtaaaggcccggaggaatgccagtacgtctagctcagccggatgaggagtccggcgttgtcgagacaatgtgtattgcgatgcactaggtaagacagagcgccactgagcctgctcgtggtatgaagggacgtgcacggatctggcaatgtccgatgatggtgataccgtcagctggatgtgaatgtttccagagtcaggcactggatgtagtgccgaagtttccttggtgacgttcctccctttgatgaggtaatgttacaacaaaaacactccgtgcaacccaggaacaatcgcaaaacccctccacccccaaaactaaacacacgacacagatacaacaatc

SEQ ID NO: 2982 - DNA, 1000 bp, Wenzhou picorna-like virus 24
  misc_feature 1..1000: note = strain WZSBei69493 hypothetical1
  source 1..1000: mol_type = genomic DNA
ctttgcctacaacctttatagtttttatgccggcccactttgatttatcaatgtggccccttgatttgtatctcgcgggatacgcccatacatttccggcatcctatttgatatttcattcgaattattttattaacatataatatttatttattcgttagtcactataattagtgcaaccggtcttcgggccattattagtccttttattagttctatcacgtgtcttcgggcacacaaatagtaaagtatttttattagatctctggagcatttaagatgctatagccttaacgaactggcgtttatcggctttttaaattgaacggtatggttaccacattgcccgggagcctattttaagctttttcctttagcggggaattatcacttattttagaataaactcctttatccaggtgactaggtattcctatcaagccaagtttcaactattaagtgtcaggataagtctttagagttaagttgcacatcgctgcgcgttgagtgcgtagttacccatggtgtgcattttgctatgataaccatcttgcatgtttcatgtcttttattaatgaggtagttgttctataacagcatttcggctgagaagctgaggtgttggaacactaatgtttacccacctatcgaatattctatacactgggttaactgcccgtatagtcttaaactagttccttctattttatctagacatggaaaagcaattcctacccctcgagtcggggaaactaattctcttcaacacatactagtctcttcggagagtgttgaagcccttaatcattcttgtaatgaacatgtgcagttacatggtttatttcattttactgccaagtgtagttgtttcaatgttgacttgattgtctcaaaggatgacacacacgaatcaaaagtggatctatcttcggatgattccaatgtcaaagaagtactatttactgagagcgattatttttcgatttcgcaacagacaggg

SEQ ID NO: 2983 - DNA, 1000 bp, Beihai picorna-like virus 9
  misc_feature 1..1000: note = strain BHBJDX18814 hypothetical protein1
  source 1..1000: mol_type = genomic DNA
cctaaaaatatatgtgtgaattgctctccgtgaaaggagatactgatcatgtaataggtgctttaagcactgaagctgcaagaactacagcgtaatcaacgcgaaccccgcttgctcagcgggaaataaatagagcatttttggtaatcttcttacctctgaatatagaaaaagaagacgtcgttcgaagccggaacgtaatccggattttacattacagtaccttcgcgtaggtgcagtaacaaatagttggtggagccaaccgtctagatatagtgatctaggacacactaccactttttaattttacattataaagaacacacgaactcacctcttggcgggctacgtaacgtagttttgaggttctcttataggtatacttatcctgttagagagtgcgatgtacggcatggagcagtaatatacttttatagtattcagactgtgttcgttacttatatttgtaataaatattgattagtggtcagctctttcatcttatcccaaggctttattcgaccttgggtgtttgttagagtgtgtggcttgttagactgaagcaaaggcttgagcttcgacttttcgagcaaagaattagaatagatctggcgccgttgggcttaactagcccctcggcatcaaatagcatgaaattactaacgccttttcaaaagtactagaccctctttcctttgaaggaggaacttacgatttgtactctccccaatcttttaatttgtggtcaagatggcaatttattagcaaatacttggcacgggaactttctaaagaagttctttccaaaattgaaggattggtggctttgtttttggcactcagtgaggttcagacggagaaaggtttcttgtctgtgttaatactttatgtaaaaacacattgtgacgagtctcttattaaattcgtgactgaacaggttgcagtcctgtttaagggctatacggcacagagttctggccgtccaaagtggttggatgat

SEQ ID NO: 2984 - DNA, 191 bp, unidentified
  source 1..191: mol_type = unassigned DNA; note = SF573 Dicistrovirus sequence
aaaaccgaccccagagatcagaaagtcgttgacgcgatcttttattagaggacgttgcgctggcgcgagctttaattagcagacgccaaaaataaacaacaaaatgctgatcgcgagacttaattgtcagacgattggccaaatccgatgtgatctttgctgctcccagattgccgaaataggagtagtag

SEQ ID NO: 2985 - DNA, 193 bp, unidentified
  source 1..193: mol_type = unassigned DNA; note = CRPV sequence
aaaagcaaaaatgtgatcttgcttgtaaatacaattttgagaggttaataaattacaagtagtgctatttttgtatttaggttagctatttagctttacgttccaggatgcctagtggcagccccacaatatccaggaagccctctctgcggtttttcagattaggtagtcgaaaaacctaagaaatttacct

SEQ ID NO: 2986 - DNA, 675 bp, Chicken orivirus 1
  source 1..675: mol_type = genomic DNA
aaaccctcacgagtgcttgtggtaggtcccaggccaatattcttcgtaaggcttggttccaattttccaccactcgtgtttgggttctggcctatggtacccagaggggcggtttgggggaattaactccccctcccctgtggtcctataccaccccacacctctgtgggctttctttactatcttcttgttttccgacttttaaacactaggcaggcgcgcctagtcatacaccgcccggctggtctttccagctcttgtgggcggtgcgcgctggtccatcgtgcccagcgacatagcaccttgtggacacctccgaacgccctcccctgtatggggtggtgcccaggggtttcagtgtggtgacacactccctggggcccgaaaggctagtgtgcaacaggtgaggtacagccagctgcccccgtggctggagggaccaagcttgtgaagcacacctcaccttcttgggggtgggctagtaagtggtgaaagcatagtgtccgtgtcgctggccaacactttgggtcaagtccagccactcagtgagtagatgcccaggaggtacccctagtggatctgacttggggcctgttacttaatgcaggttaaaaactatgaaagctgagtagtgtagcccggctggtggcttctcttccttattcattctatttt

SEQ ID NO: 2987 - DNA, 630 bp, unidentified
  source 1..630: mol_type = unassigned DNA; note = PV1.0 sequence
aacaaaaggctacaccacttgggctacggcccgcgccaccttgtggcgcaaagacattagaagaatagcataccgcccactagggccctgcagccagcagggtaacgggcaagcacttctgtctccccggtagaacggtataggctgtacccacggccgaaaactgaactatcgttacccgactccgtacttcgcaaagcttagtaggaaactggaaagttcgagttattgacccggagtgttccccccactccagaaacgcgtgatgagggttgccaccccgaccatggcgacatggtgggcatccctgcgctggcacgcggcctctaagaggataactcgctcctactggtaaccgaagagccccgtgagctacggtttattcctccgcctccctgaatgcggctaatcctaacccatgagcagttgccatagatccatatggtggactgtcgtaacgcgtaagttgtgggcggaaccgactactttgggatggcgtgtttccttgttttctccatttgttgttgtatggtgacaagttatagatctcgatctatagcgtttcttgagagatttccaaacatttattcaagtcgtacaattcttgtgtttaagcagtacagtgtaacc

SEQ ID NO: 2988 - DNA, 630 bp, Parabovirus
  misc_feature 1..630: note = 5?48
  source 1..630: mol_type = genomic DNA
aacaaaaggctacaccacttgggctacggcccgcgccaccttgtggcgcaaagacattagaagaatagcataccgcccactagggccctgcagccagcagggtaacgggcaagcacttctgtctccccggtagaacggtataggctgtacccacggccgaaaactgaactatcgttacccgactccgtacttcgcaaagcttagtaggaaactggaaagttcgagttattgacccggagtgttccccccactccagaaacgcgtgatgagggttgccaccccgaccatggcgacatggtgggcatccctgcgctggcacgcggcctctaagaggataactcgctcctactggtaaccgaagagccccgtgagctacggtttattcctccgcctccctgaatgcggctaatcctaacccatgagcagttgccatagatccatatggtggactgtcgtaacgcgtaagttgtgggcggaaccgactactttgggatggcgtgtttccttgttttctccatttgttgttgtatggtgacaagttatagatctcgatctatagcgtttcttgagagatttccaaacatttattcaagtcgtacaattcttgtgtttaagcagtacagtgtaagg

SEQ ID NO: 2989 - DNA, 675 bp, Parabovirus B
  source 1..675: mol_type = genomic DNA
aacccataatccattgtccatcaatgttttatgggggggaccctttctcccctccccctccaaataccttttacccctctgtaaccaagagtgtgcaaaatctatttactagcccagaattgcggcttctggggaggtttattcctcatgcctaacaagatgttacgcaaactccgggctacggccctgggcttttgccctaaagatttagaagtttacactatcgtccaacaggaggacaacaaaccagttgttctaaggacaagcacttctgtttccccggtgagactggatagactgtacccacggttgaaactggttgatccgttacccgactcactacttcgagaagattagtaggaaactgtgaaactgattccattgatccggatactttccccgtatccagaaactactgatgagggttgacttcccgactacggcgacgtagtgtcatccctgcgctggcagtaggcctctttgaggatggaagatgtggatcggtaaccgaaggtcctattgagctagtgtttatacctccggcctcctgaatgcggctaatcctaacccatgatctagtgctcacaaaccagtgagtagctagtcgtaacgcgtaagtcgtgggcggaaccgactactttggagtgaccgtgtttcctattttacttttgtttg

SEQ ID NO: 2990 - DNA, 636 bp, Echovirus E30
  source 1..636: mol_type = genomic DNA
aagcaaggcaaacctgaccaatagtaggtgtggcacaccagccgcattttggtcaagcacttctgtttccccggaccgagtatcaataagctgctcacgcggctgaaggagaaaccgttcgttacccgaccagctacttcgagaaacctagtaacactatgaacgttgcggagtgtttcgttcagcacttcccccgtgtagatcaggtcgatgagtcaccgcattcctcacgggtgaccgtggcggtggctgcgttggcggcctgcctacgggttcgcccgtaggacgctctaataccgacatggtgtgaagagtccattgagctagctggtagtcctccggcccctgaatgcggctaatcctaactgcggagcaggtgctcacagaccagtgagtagcctgtcgtaacgggcaactctgcagcggaaccgactactttgggtgtttttccttttttcttctcttatattggctgcttatggtgacaattaaagaattgttaccatatagctattggattggccatccggtgacgagcagagccattgtttacctctttgttggatttgtacctttgaaccacaaagtcttgaataccattcatctcattttaaagttcaactcagctaaaagaaa

SEQ ID NO: 2991 - DNA, 675 bp, Equine rhinitis A virus
  source 1..675: mol_type = genomic DNA
aagggttactgctcgtaatgagagcacatgacattttgccaagatttcctggcaattgtcacgggagagaggagcccgttctcgggcacttttctctcaaacaatgttggcgcgcctcggcgcgccccccctttttcagccccctgtcattgactggtcgaaggcgctcgcaataagactggtcgttgcttggcttttctattgtttcaggctttagcgcgcccttgcgcggcgggccgtcaagcccgtgtgctgtacagcaccaggtaaccggacagcggcttgctggattttcccggtgccattgctctggatggtgtcaccaagctggcagatgcggagtgaaccttacgaagcgacacacctgtggtagcgctgcccagaagggagcggagctcccccgccgcgaggcggtcctctctggccaaaagcccagcgttaatagcgccttctgggatgcaggaaccccacctgccaggtgtgaagtggactaagtggatctccaatttggcctgttctgaactacaccatctactgctgtgaagaatgtcctgaaggcaagctggttacagccctgatcaggagccccgctcgtgactctcgatcgacgcggggtcaaaaactgtctaagcagcagcagaaacgcgggagcgtttctttttcctcatttgtttc

SEQ ID NO: 2992 - DNA, 576 bp, Equine rhinitis A virus
  misc_feature 1..576: note = U188
  source 1..576: mol_type = genomic DNA
aatattggcgcgcgcatttgcgcgcccccccccatttcagccccctgtcattgactggtcgaaggcgttcgcaataagactggtcgtcacttggctgttctatcgtttcaggctttagcgcgccctcgcgcggcgggccgtcaagcccgtgcgctgtatagcgccaggtaaccggacagcggcttgctggattttcccggtgccattgctctggatggtgtcaccaagctgacaaatgcggactgaacctcacaaagcgacacacctgtggtagcgctgcccaaaagggagcggaactcccccgccgcgaggcggtcctctctggccaaaagcccagcgttaatagcgccttttgggatgcaggagccccacctgccaggtgtgaagtggagtgagtggatctccaatttggtctgttctgaactacaccatctactgctgtgaagaatgccctggaggcaagctggttacagccctgaccaggggccctgcccgtgactctcgatcggcgcagggtcaaaaattgtctaagcagcagcaggaacgcgggagcgtttcttttccctttgtatcgac

SEQ ID NO: 2993 - DNA, 612 bp, Vilyuisk human encephalomyelitis virus
  source 1..612: mol_type = genomic DNA
aattccttcttcctttctccttggacctcggtcccccggtctaagccgctcggaatatgacagggttattttcacctcttctctcttctacttcatagtgttctatactatgaaagggtatgtgtcgccccttccttcttggagaacgtgcgtggcggtctttccgtctctcgaaaaacgtgcgtgcgacatgcagagtaacgcaaagaaagcagttcttggtctagctctggtgcccacaagaaaacagctgtagcgaccacacaaaggcagcggaaaccccctcctggtaacaggagcctctgcggccaaaagccacgtggataagatccacctttgtgtgcggtgcaaccccagcaccctggtttcttggtgacaccttagtgaaccctcgaatggcaatctcaagcgcctctgtaggaaagccaagaatgtccaggaggtaccccttcctcatggagggatctgacctggagacacatcacacgtgctatacacttgtgcttgtgtttaaaaattgtcacagctttcccaaaccaagtggtcttggttttcccttaacttcgaaaagtcactatggcctgcaaacatggatacccagacgtgtgccct

SEQ ID NO: 2994 - DNA, 675 bp, Foot-and-mouth disease virus
  misc_feature 1..675: note = O isolate
  source 1..675: mol_type = genomic DNA
acaagcttgacaccgcctgtcccggcgttaaagggaagtaaccacaagcttacaaccgcctaccccggtgttaatgggatgtaaccacaagatacaccttcacccggaagtaaaacggcaaattcacacagttttgcccgtttttcatgagaaacgggacgtctgcgcacgaaacgcgccgtcgcttgaggaggacttgtacaaacacgatctaaacaggtttccccaactgacatacaccgtgcaatttgaaactccgcctggtctttccaggtctagaggggtaacactttgtactgtgcttgactccacgctcggtccactggcgagtgttagtaacagcactggtgcttcgtagcggagcatggtggccgtgggaactcctccttggtaacaaggacccacggggccgaaagccacgtcctgacggacccaccatgtgtgcaaccccagcacggcaacttttctgtgaaactcactctaaggtgacactgatactggtattcaagtactggtgacaggctaaggatgcccttcaggtaccccgaggtaacacgcgacactcgggatctgagaaggggactggggcttctgtaaaagcgcccagtttaaaaagcttctatgcctggataggtgaccggaggccggcgcctttccattataactactgacttt

SEQ ID NO: 2995 - DNA, 675 bp, Hunnivirus A2
  source 1..675: mol_type = genomic DNA
acagtttttgacaaggaccctcacctgtcaatcgggaccaccactttcagtgaccccgtgcgaagtgttgagagaaagtgagctttcttacccttcatttgtgaacccttcagtcgaagccgcttggaataagatggaaggaaatgttcattctaaatggagtgaaacatatacttaatttccagtgtttagtggtctttccactagacaacggcactgtcttgccggaactctacacaccaacattccacgcttgtgggactcaaatgttggatgacacagttgtagctggaactgagtgtttagtgcactctgtgtaacagtgaaaacaatgtgatcacttcggtgggctagtagcctgtggactaacaactggtaacagttgcctcaggggccaaaagccacggtgttaacagcaccctactagtttgattggagcaatccatgatgttacagagttagtaactgccaaacagattgtactggtatcttggcataccgtgcaacttaggatagtgaaggatgccctggcggtacccataggtaacaagtgacactatggatctaaacaggggctcactctacgttgctttacaactagctgtgagttaaaaaacgtctaactatccacaacctaggggactaggttttcctttttatttttatacacaacta

SEQ ID NO: 2996 - DNA, 319 bp, unidentified; identical to SEQ ID NO: 304
  source 1..319: mol_type = unassigned DNA; note = PLV-CHN sequence

SEQ ID NO: 2997 - DNA, 675 bp, Posavirus 1
  source 1..675: mol_type = genomic DNA
acatttccttgcgtgcgcacccgaaaatttattgaacttggcttgaatcataagtaatgcttcttatagcggacactttgagaatataatgcttgtatggattaatgtatactgttttaaataacaaacctagacacgcagttgcgttgatggttgtatcaatcacatataagtgttgaactcgtgttaatcctcgatcgctatatgtttgccgcctacttccaataaaatagattacatgcgcgtcatgcctttgtgggttacctattggcctctgacaaaaacaagtcgtaagatttgtagcttcccggtgtaaaaagctgggcgcggtctggctctcgtagggtggaaaggtccaccaatggctggttgagtgtaagctccggtgtcctggttgtcgcaattccaggcgtcgtaataacctatattgcatctgactctaactcttgtggctctactgtatctagttcttgttctactaactctaataatactactggctctaatactgaaaaacttacatatgttaatatagataatatccttgatcctgatatccctcacgtcactgaagttcgccgaaaacgaatttcagatcatatcattgaatctcaaggatgtacttgctctgaacctactataactcctcatgcgttttcattttctactcttggc

SEQ ID NO: 2998 - DNA, 107 bp, Rinderpest virus
  source 1..107: mol_type = genomic DNA
accaaacaaagttgggtaaggatcggtctatcaatgattatgatttagcacacttaggattcaagatcctatcgactggagcaggcttaaggtaaaggttctttaaa

SEQ ID NO: 2999 - DNA, 134 bp, unidentified
  source 1..134: mol_type = unassigned DNA; note = Avian paramyxovirus penguin sequence
accaaacaaggactagataacccacgtgaccgttaactggaaaataagatgttgtaggggcgacctagttggaattcgaccccggctccgaaacctctaattgtggttattggcagtctagtctacttctaacg

SEQ ID NO: 3000 - DNA, 121 bp, Newcastle disease virus
  source 1..121: mol_type = genomic DNA
accaaacagagaatctgtgaggtacgataaaaggcgaagaagcaatcgagatcgtacgggtagaaggtgtgaaccccgagcgcgaggccgaagctcgaacctgagggaaccttctaccgat

SEQ ID NO: 3001 - DNA, 145 bp, Mumps virus
  source 1..145: mol_type = genomic DNA
accaaggggaaaatgaagatgggatgttggtagaacaaatagtgtaagaaacagtaagcccggaagtggtgttttgcgatttcgaggccgggctcgatcctcacctttcattgtcgataggggacattttgacactacctggaaa

SEQ ID NO: 3002 - DNA, 107 bp, Dolphin morbillivirus
  source 1..107: mol_type = genomic DNA
accagacaaagctggctaggggtagaataacagataatgataaattatcatacttaggattaatgatcctatcaattggcacaggatttggataaaggttcacagtc

SEQ ID NO: 3003 - DNA, 107 bp, Canine distemper virus
  source 1..107: mol_type = genomic DNA
accagacaaagttggctaaggatagttaaattattgaatattttattaaaaacttagggtcaatgatcctaccttaaagaacaaggctagggttcagacctaccaat

SEQ ID NO: 3004 - DNA, 675 bp, Human poliovirus 1
  misc_feature 1..675: note = strain EQG1419328
  source 1..675: mol_type = genomic DNA
acccttgtacgcctgttttatactcccctccccgtaacttagaagaaacaaaataagttcaataggagggggtacaaaccagtaccaccacgaacaagcacttctgtctccccggtgacattgcatagactgtccccacggttgaaagcaattgatccgttacccgctcttgtacttcgagaagcctagtaccatcttggaatcatcgatgcgttgcgctccacactcagtcccagagtgtagcttaggctgatgagtctggacattcctcaccggcgacggtggtccaggctgcgttggcggcctacctgtggcccaaagccacaggacgctagatgtgaacaaggtgtgaagagcctattgagctataagagagtcctccggcccctgaatgcggctaatcccaaccacggatcaagggtgcacgaaccagtgtataccttgtcgtaacgcgcaagtccgtggcggaaccgactactttgggtgaccgtgtttccttttattatttcaatggctgcttatggtgacaatcattgattgttatcataaagcgaattggactggccatccggtgaaagtgaaacatattgtttgcctcctcgttgggtctacttcaaccaatctttacttacaatcttaccactacagttttgctggttagaagtgtgtttcacg

SEQ ID NO: 3005 - DNA, 675 bp, unidentified
  source 1..675: mol_type = unassigned DNA; note = Parabovirus A3 sequence
accgttacgcaccactcagttggtgtttggtggcaccaatgatggaacaaaaggctacaccacttgggctacggcccgcgccaccttgtggcgcaaagacattagaagaatagcataccgcccactagggccctgcagccagcagggtaacgggcaagcacttctgtctccccggtagaacggtataggctgtacccacggccgaaaactgaactatcgttacccgactccgtacttcgcaaagcttagtaggaaactggaaagttcgagttattgacccggagtgttccccccactccagaaacgcgtgatgagggttgccaccccgaccatggcgacatggtgggcatccctgcgctggcacgcggcctctaagaggataactcgctcctactggtaaccgaagagccccgtgagctacggtttattcctccgcctccctgaatgcggctaatcctaacccatgagcagttgccatagatccatatggtggactgtcgtaacgcgtaagttgtgggcggaaccgactactttgggatggcgtgtttccttgttttctccatttgttgttgtatggtgacaagttatagatctcgatctatagcgtttcttgagagatttccaaacatttattcaagtcgtacaattcttgtgtttaagcagtacagtgtaagg

SEQ ID NO: 3006 - DNA, 384 bp, Hepacivirus A
  source 1..384: mol_type = genomic DNA
acctccgtgctaggcacggtgcgttgtcagcgttttgcgcttgcatgcgctacacgcgtcgtccaacgcggagggaacttcacatcaccatgtgtcactccccctatggagggttccaccccgcttacacggaaatgggttaaccatacccaaagtacgggtatgcgggtcctcctagggcccccccggcaggtcgagggagctggaattcgtgaattcgtgagtacacgaaaatcgcggcttgaacgtctttgaccttcggagccgaaatttgggcgtgccccacgaaggaaggcgggggcggtgttgggccgccgccccctttatcccacggtctgataggatgcttgcgagggcacctgccggtctcgtagaccataggac

SEQ ID NO: 3007 - DNA, 340 bp, Hepatitis C virus
  misc_feature 1..340: note = QC64
  source 1..340: mol_type = genomic DNA
acctgcccctaataggggcgacactccgccatgaatcactcccctgtgaggaactactgtcttcacgcagaaagcgtctagccatggcgttagtatgagtgtcgtacagcctccaggcccccccctcccgggagagccatagtggtctgcggaaccggtgagtacaccggaattgccgggaagactgggtcctttcttggataaacccactctatgcccggacatttgggcgtgcccccgcaagactgctagccgagtagcgttgggttgcgaaaggccttgtggtactgcctgatagggtgcttgcgagtgccccgggaggtctcgtagaccgtgcatc

SEQ ID NO: 3008 - DNA, 675 bp, unidentified
  source 1..675: mol_type = unassigned DNA; note = A115-675 sequence
acctttgtgcgcctgttttataccccccccaacctcgaaacttagaagtaaagcaaacccgatcaatagcaggtgcggcgcaccagtcgcatcttgatcaagcacttctgtaaccccggaccgagtatcaatagactgctcacgcggttgaaggagaaaacgttcgttacccggctaactacttcgagaaacccagtagcatcatgaaagttgcagagtgtttcgctcagcactacccccgtgtagatcaggccgatgagtcaccgcacttccccacgggcgaccgtggcggtggctgcgttggcggcctgcctatggggcaacccataggacgctctaatacggacatggtgcgaagagtctattgagctagttagtagtcctccggcccctgaatgcggctaatcctaactgcggagcacatacccttaatccaaagggcagtgtgtcgtaacgggtaactctgcagcggaaccgactactttgggtgtccgtgtttccttttaatttttactggctgcttatggtgacaattgaggaattgttgccatatagctattggattggccatccggtgactaacagagctattgtgttccaatttgttggatttaccccgctcacactcacagtcgtaagaacccttcattacgtgttatttctcaactcaagaaa

SEQ ID NO: 3009 - DNA, 675 bp, unidentified
  source 1..675: mol_type = unassigned DNA; note = A110-675 sequence
acctttgtgcgcctgttttataccccctcccccaactgtaacttagaagtaacacacaccgatcaacagtcagcgtggcacaccagccacgttttgatcaagcacttctgttaccccggactgagtatcaatagactgctcacgcggttgaaggagaaagcgttcgttatccggccaactacttcgaaaaacctagtaacaccgtggaagttgcagagtgtttcgctcagcactaccccagtgtagatcaggtcgatgagtcaccgcattccccacgggcgaccgtggcggtggctgcgttggcggcctgcccatggggaaacccatgggacgctctaatacagacatggtgcgaagagtctattgagctagttggtagtcctccggcccctgaatgcggctaatcctaactgcggagcacacaccctcaagccagagggcagtgtgtcgtaacgggcaactctgcagcggaaccgactactttgggtgtccgtgtttcattttattcctatactggctgcttatggtgacaattgagagatcgttaccatatagctattggattggccatccggtgactaatagagctattatatatccctttgttgggtttataccacttagcttgaaagaggttaaaacattacaattcattgttaagttgaatacagcaaa

SEQ ID NO: 3010 - DNA, 675 bp, unidentified
  source 1..675: mol_type = unassigned DNA; note = Human coxsackievirus A2 sequence
acctttgtgcgcctgttttatatccccaccccgagtaaacgttagaagttacgcaaccccgatcaatagtaggtgtagcactccagctgcatcgagatcaagcacttctgtctccccggaccgagtatcaatagactgctaacgcggttgaaggagaaaacgttcgttacccggccaattacttcgagaagcccagtagtgccgtgaaagttgcggagtgtttcgctcagcacttcccccgtgtagatcaggctgatgagtcaccgcgatccccacaggtgactgtggcggtggctgcgttggcggcctgcctatggggcaacccataggacgctctaatacagacatggtgcgaagagcctattgagctaattggtagtcctccggcccctgaatgcggctaatcctaactgcggagcacatgccctcaaaccagggggtggtgtgtcgtaacgggtaactctgcagcggaaccgactactttgggtgtccgtgtttctttttattcttataatggctgcttatggtgacaattaaagaattgttaccatatagctattggattggccatccggtgactaacaaatcgctcatataccagtttgttggttttgttcccttatcacatacagctcataacaccctcttatatttactacaattgaatagcaagaa

SEQ ID NO: 3011 - DNA, 675 bp, Bat Iflavirus
  source 1..675: mol_type = genomic DNA
acgaatcggtatacgcttcggtacctattgttgcaagttcgttccctattttcgatttgcctgcccgaatttgactcaaacaattgtgacatactatgtctctgtttgaaagcactacacgagtttgcgcccagcatgtatgttttcaagtcttttgtataagtctgcctctatagtggttttctttgaccttaaagccttgtcaaccatcctatatgctgcatcgagacttgatgtcaatctgcctctactacgcaaatgtctagtaattagttataaggttttactattttccctcatttccaattttagtttgtagtgtatgtgagtatcattcttactccgactgttaagagaaaccaatttatagtcgttaaatatgataaatggaatgaatgatggtgtcattttaaaaacactcttctctataggcgtaagcattctcgctcttagagtcgtaaagaagaaatgccgtgtctatcagtatgttatgcgatttattttctgccacgcgcttctagtgcaatctagttgacatacagacattgcctaccactcgcgagggtcgaccggtagtgtaaggagtaagtgatgatttccgcttattctgtaccctttgcctggtgaggacagatcctgactaattttaaatataaatgaacactagcttccaag

SEQ ID NO: 3012 - DNA, 143 bp, Farmington virus
  source 1..143: mol_type = genomic DNA
acgacgcataagcagagaaacataagagactatgttcatagtcaccctgtattcattattgacttttatgacctattattagacccttcacgggtaaatccttctccttgcagttctcgccaagtacctccaaagtcagaacg

SEQ ID NO: 3013 - DNA, 675 bp, unidentified
  source 1..675: mol_type = unassigned DNA; note = Poecivirus BCCH-449 sequence
actacacaatcgcaacacgcgcaagtttgtagtttgattggcgtgcaaatgtcaaatcaagcatataacacaatttggtggctgttggtgtttgttataggaattttggttgtgttgaaattgtggatgtgtaggaaatatgcacaattacgtcagcgtcaggagttttataacctggcgcaacaccaaaatggtcttcgcgctttaacatcaccagcgaggtgtaaacaaattgaagttgaattagatcgtgtataggccagggaaccatccctcccaacgccacatcttgtggggaagttgggataatggtgggtctatatgaattggtctgtagacccacagtgaagagtgaatagtatgcttgcggttccatttgttaatggtctagcatgggtgggggcggcaaccccgtgaggggttccccactggccaaaagcccaggggttagtcatttcaaccaaggaagctggtaacctggtgacctgaacttgagtggtgagacccccttgctagagtgtgtaaaccgattgtaagcattttgtttgcttagtatctgtggtataagcagtcaattttgtataggctcaaggctgtggtagttagtagatgcccggaaggttattactgatccggggaccgtgactatacattaggtaaaccggtttaaaaacc

SEQ ID NO: 3014 - DNA, 675 bp, unidentified
  source 1..675: mol_type = unassigned DNA; note = Aichivirus Rt386 sequence
actccattcagcttcttcggaacctgttcggaggaattaaacgggcacccactttcctgtcctctccccctttctgcaactcaagtgtgtgctcgtaatcctgactcccacgggttgaccgccccgttggtgaacaaacagctaggtcattccctccctacccctgggcgccatttcagtggcgttcatatcctccccccagcctgacgtgtcacaggctgtgcaaagtccccgcgaaagctgctcacgtggcaattgtgggtcccccctttgtgaaggaaccgagtctttctcccttaaggctagacccctgtgtgaactcacaggtggcaactagtggttccactgcatgctcccgacctcggccgcggagtgctgttccccaagtcgtgacactgacctccacttatgtgcctggcaagcatatctgagaagatgttccgctgtggctgccaaacctggtaacaggtgccccagtgcgtgtagtcttcttccgtctccggacggtaagtgtgtggtaaagatgcggcgtaaggttcaagtgccaacgccctggaagggatgacccttctactgccctaggaatgccgcgcaggtaccccaggttcgcctgggatctgagcgcgggctaattgtctacgggtagtttcatttccctctcttttcactggcatc

SEQ ID NO: 3015 - DNA, 675 bp, unidentified
  source 1..675: mol_type = unassigned DNA; note = Aichivirus Goiania sequence
actccattcagcttcttcggaacctgttcggaggaattaaacgggcacccatacacccccatccccttttttgcaacttaagtatgtgtgctcgtaatcttgactcccacggaatggatcgatccgctggagaacaaactgctagatccacatcctccctcccccctgggaggacctcggtcctcccacatcctccccccagcctgacgtatcacaggctgtgtgaagcccccgcgaaagctgctcacgtggcaattgtgggtccccccttcatcaagacaccaggtctttcctccttaaggctagtcccgatgtgtgaattcacatcgggcaactagtggtgtcactgtgcgctcccaatctcggccgcggagtgctgttccccaagccaaacccctggcccttcactatgtgcctggcaagcatatctgagaaggcgttccgctgtggctgccagcctggtaacaggtgccccagtgtgcgtaaccttcttccgtccccggacggtagtgattggttaagacttggcgtaaggttcatgtgccaacgccctgtgcgggatgaaacctctactgccctaggaatgccaggcaggtaccccaccttcgggtgggatctgagcctgggctaattgtctacgggtagtttcatttctaattctttcatgtcggagtc

SEQ ID NO: 3016 - DNA, 675 bp, Enterovirus sp.
  misc_feature 1..675: note = isolate CPML
  source 1..675: mol_type = genomic DNA
actctggtatcacggtacctttgcacgcctattttataccccttccccatcgtaacttagaagcaacaaacaaactgcccaatagcagcacaacacccagttgtgttaggggcaagcacttctgtttccccggaagggtctgacggtatgctgtacccacggcagaagtatgacctaccgttaaccggccatgtacttcgagaagcctagtaccattatgaaggttgattgatgttacgctccccagcaaccccagctggtagttctggtcgatgagtctcggcattccccacgggcgaccgtggccgaggctgcgttggcggccagcctacaccatacggtgtaggacgtcaagatactgacatggtgtgaagagcctattgagctacgtggtagtcctccggcccctgaatgcggctaatcctaactccggagcatccgccagtaagcccactggaagggtgtcgtaatgcgaaagtctggagcggaaccgactactttgggtgtccgtgtttcctgttttacttattgtttggctgcttatggtgacaacttatagttatcatcataagctacttggtcttgccaaccggagaattatttggttatttgttggtttcataaacctacagtcgtattttcctgtcttattaattgttctcaaaattaacaaca

SEQ ID NO: 3017 - DNA, 248 bp, unidentified
  source 1..248: mol_type = unassigned DNA; note = Yc-3 sequence
actgaagatcctacagtaactactgccccaatgaacgccacagatgggtctgctgatgactacctatcttagtgctagttgaggtttgaagtgagccggtttttagaagaaccagtttctgaacattatcatccccagcatctattctatacgcacaagatagatagtcatcagcagacacatctgtgctactgcttgatagagttgcggctggtcaacttagattggtataaccagttgagtggcaa

SEQ ID NO: 3018 - DNA, 528 bp, Avian infectious bronchitis virus
  source 1..528: mol_type = genomic DNA
acttaagatagatattaatatatatctattacactagccttgcgctagatttttaacttaacaaaacggacttaaatacctacagctggtcctcataggtgttccattgcagtgcactttagtgccctggatggcacctggccacctgtcaggtttttgttattaaaatcttattgttgctggtatcactgcttgttttgccgtgtctcactttatacatctgttgcttgggctacctagtgtccagcgtcctacgggcgtcgtggctggttcgagtgcgaggaacctctggttcatctagcggtaggcgggtgtgtggaagtagcacttcagacgtaccggttctgttgtgtgaaatacggggtcacctccccccacatacctctaagggcttttgagcctagcgttgggctacgttctcgcataaggtcggctatacgacgtttgtagggggtagtgccaaacaacccctgaggtgacaggttctggtggtgtttagtgagcagacatacaatagacagtgacaac

SEQ ID NO: 3019 - DNA, 292 bp, Human coronavirus 229E
  source 1..292: mol_type = genomic DNA
acttaagtaccttatctatctacagatagaaaagttgctttttagactttgtgtctacttttctcaactaaacgaaatttttgctatggccggcatctttgatgctggagtcgtagtgtaattgaaatttcatttgggttgcaacagtttggaagcaagtgctgtgtgtcctagtctaagggtttcgtgttccgtcacgagattccattctacaaacgccttactcgaggttccgtctcgtgtttgtgtggaagcaaagttctgtctttgtggaaaccagtaactgttccta

SEQ ID NO: 3020 - DNA, 310 bp, Feline infectious peritonitis virus
  source 1..310: mol_type = genomic DNA
acttttaaagtaaagtgagtgtagcgtggctataactcttcttttactttaactagccttgtgctagatttgtcttcggacaccaactcgaactaaacgaaatatttgtctctctatgaaaccatagaagacaagcgttgattatttcaccagtttggcaatcactcctaggaacggggttgagagaacggcgcaccagggttccgtccctgtttggtaagtcgtctagtattagctgcggcggttccgcccgtcgtagttgggtagaccgggttccgtcctgtgatctccctcgccggccgccaggaga

SEQ ID NO: 3021 - DNA, 436 bp, Coronavirus AcCoV-JC34
  source 1..436: mol_type = genomic DNA
agaaacaagtagtgttttaaaaaccttcaaattagtgcctgtaacatctttgcaatgaaagtagcgctcactagcctctatgcaaagaatgttaaaagaaatacgaagcatttaaagaatacaatctatctaggataggtacaattctcctccccctcttgacttcggtcaactcaactcaactaaacgaaatcccccttgcatggttccgacccgtgtaaggttgtgtatttcgtgcagtcgttgcccttactagtgtaagcgtaacggcatctaggtttgcacgtcttggaggaaacggtgtgtacgtttctagtgtttacgccgtatcggttccggcccgataggtattgcattagacgtcctgggtggttctgcctgcccttgtgtgattcggctgttccgtcagtttggtcacctcacacgtccttaagac

SEQ ID NO: 3022 - DNA, 393 bp, unidentified
  source 1..393: mol_type = unassigned DNA; note = Equine Pegivirus 1 sequence
agaatggggagttaactcctggcactggcccgaagcatgaactgatcgcggtggcagggttcttcgggtaaatcccggccgcgtgttgtgattgtgttagggcaggtgacagtcggcagggtcgaccccctgcttcaggaccactgtcttcctggacgaccgttgctgaaaaagggccgccacggtctgtagctcgccgacgcttctaattcaggccggaggaccacgctccgtaatcgagcccaagtactcaaaccccagcacccctgggtcacgccctacgccgcccttttaacgcttcggctaatagggtctatccggcgggttgacaaagggcgcagggttacctggtactacgagcttgggtgtccctgggagtaatcccagggtgcc

SEQ ID NO: 3023 - DNA, 524 bp, unidentified
  source 1..524: mol_type = unassigned DNA; note = Pegivirus I sequence
agaatggtctaagtggttgccaccgtggtccgaaggggaggaggacctacgctgccagggttggcaggtcgtaaatcccgggtgtaggagatccctccttgttaggactgctggtagctggggggtcggtgaccccctgggcaaccgccaaacccggacgaccgggtggcggctccatgttggcacggtccacaggtgtgaaccctaccggtgtgaataagggttggtggttgcggtccaccttaaacgtagtatgcattgggcttggtaaaacaccgctcgtagtacggaacgccgcctttaaagacacagtaggcgtagccggcgggttgacaatccatacggggggtggggtgtggtcatggatctgtccacaccaccttcatgcggccctctaagcaagccataccggggggaggcgcgcggcaccgcactgccgggcaaggggaagaaccttcgggtgacccccccccaaccaccgtccgatcaatgctaatgttgcgtttaggcgtgacaccggcaca

SEQ ID NO: 3024 - DNA, 537 bp, unidentified
  source 1..537: mol_type = unassigned DNA; note = Pegivirus K sequence
agaatggtgtgatccgtcgccgctccagcggaaagcgggcgggatctagtggttagggttgttcgcgtaaatcccacactagtggtacgctcgtataacgtgggagcagccggtggggtcgaccccccacctggcggctgctgagcaccggacgaagcgcggggggtgaacgctaacccgcggcccgggctgccaacgttaggcacgtcttggctggaagacgttaaacacagggccccccctcaaccctgatccgaggccagagaccaaggtacgccgcccttttaaaggcgttactcgtccaataggatctctccggcgggttgtcaaaccttgctggccctggtgatggttacgggagggggtggggcggggagtagaagccccgcccggcatgggggtaccaagctcggcacgcccagcacgcgtggcgtaggggaaaaatccttcgggtgacccctggtaccataaagtaattaacatgagcatgccgctagggtgtgctttttcttccttccttgggaaggcggtggcacc

SEQ ID NO: 3025 - DNA, 631 bp, Parechovirus A3
  source 1..631: mol_type = genomic DNA
agagtccttttcccagccagaggtggctggttaaataatacctactgtaacaaaacatctaagatgtaacaaccacacacctggtctccactggccgaaggcaactagcaataaggcaggtgggttcagacgcttaaagtgtgttgtacatattcttttctaacctgtgttttacacagggtggcagatggcgtgccataactctaacagtgagataccacgcttgtggaccttatgctcacacagccatcctctagtaagtttgtaagatgtctgatgacgtgtgggaacctgttggagataacagtttgctgcaaagcatcccactgccagcggatctacatctggtaacagatgcctctggggccaaaagccaaggtttaacagaccctttgggattggttcaaacctgaactgttatggaagacatttagtacctgctgatttggtagtaatgcaaacactagttgtaaggcccacgaaggatgcccagaaggtacccgtaggtaacaagtggcactatggatctgatctggggccagctacctctatcttggtgagttggttaaaaaacgtctagtgggccaaacccaggggggatcctggtttctttttaatttaagtaatcact

SEQ ID NO: 3026 - DNA, 675 bp, Hubei picorna-like virus 2
  source 1..675: mol_type = genomic DNA
agcaacttctttctgaaaactagctagagttcgacgatctctctggctaatgacaaataaccaatcaaaaagtcaaatgttcatgtatatatatatttagtagtgacctttatttagaaaaactttagatgatttatcgtcaagttgccctttgtgaagcgatcagctttttatatcgtttcatttttgtatacgtcttaattgacgttgtaagtacgttttgcatacctcacattgaggatagtatcgtttcctgactaagaagttaaactagtctaccaatagcaaccatataggatatagctttgtttttaacaaggtttaatctgatcttatgctcttgcttacggtgttttatgtatagaaaagtttttataaaaactacataattgtcaaaagaaaaagcgttacgtactgacgcatttatgttcacagtgtgacacaaaccttctatattttgattgtaaaataggctttgcctgaccatttatcaaatacaaactgtttcaaacgcctctccgagccatattggccgacgcgaatcgacataacagggtgagtttacagctgcagttgcagccgaggatccacttatttgagagagaattactcttaacgaaattttgaagtcacttctacacagttaagtctgagtaggcgttatccaaacgtaaa

SEQ ID NO: 3027 - DNA, 675 bp, Picornavirales Tottori-HG1
  source 1..675: mol_type = genomic DNA
agccatgaactagtgtgcgattcccacagtgttggtcgaaagccccgcactgtctactcgcatatttgactccagtccttccgcagccagcggttaggttctggttaaagtgcattatgtgcacggcgccacgcagaactgccagaaatggtaagctgcgcccaacgccaacggtttgtgtatcccgttagtcacacgtttacagctgttcgttaacagtagggttttgtcgacccggaccccttaatgcgcgcgaattcaaccgcgcctagtcggcaatggtatcatttaatcccatgcactacgggagaaatttgagaccaaagaattcctgagggccactgcttgctctaagtgcaatgcctcgggagacttctgtcaggagcctagcggctttcaaccgcgacagctaactcctgcgggatgtttggtgtccatacttactggcgtcctcacaacgctaagtggatgttgtccacaggtaggcaaacaccgagccccacattcaggagacctgtatgaacgatcctatcagcattagagttggaattgggtgtgctaacgtccgcataagtgcaccccgtggtaacgctgggaaactatccagcgcaacgtactgtcctcaatgtctagggaaggaccgccctaagcgtacaaccgggccatgtgtcgagc

SEQ ID NO: 3028 - DNA, 150 bp, Yokose virus
  source 1..150: mol_type = genomic DNA
agtaaattttgcgtgctagtcgctgagcgtcagaccgcaaagtgagtttttagtgatctaaagtgaggagttattcttactgtcatcaaacactacaaataaacacgttgaaattatttccggaagaacaactgtccggaatcaaagacg

SEQ ID NO: 3029 - DNA, 675 bp, Staphylococcus phage SA5
  source 1..675: mol_type = genomic DNA
agtacttggtattccggtacctttgtacacctatttacaaaccctaccccttgtaaccttagaagcaattatttaaccgctcactagggggtgtgctatccaagcacatcaagagcaagcacttctgtctccccgggaggggctaatggtacgctgtgcccacggcggaaatgagccctaccgttaaccggcagtctacttcgggaagcccagtaactacattgaaactttgaggcgttacactcagcacataaccccaatgtgtagttctggtcgatgagccttggcatcccccacaggcgactgtggccaaggctgcgttggcggccagcctgcggaccaaaagtccgtaggacgcctaattgtggacatggtgtgaagagcctactgagctagactgtagtcctccggcccctgaatgcggctaatcctaaccctggagcatccgcgtgcaacccagtacgtagggtgtcgtaatgcgtaagtctgggatggaaccgactactttgggtgtccgtgtttcttgtttttcatactgggtcgcttatggttacaactaattgttgtaatcattggcagtgcgcgctgaccacgcgattattgatatttccatttgttggatactccaatagtgtcaactcatatacacaacttttaccactgatcaagataaaa

SEQ ID NO: 3030 - DNA, 118 bp, Wesselsbron virus
  source 1..118: mol_type = genomic DNA
agtatattctgcgtgctaatcgttcgacgttagtccgtggagtgagcttctattagagtcgttaacacgtttgaataatttctactgaaaggagtagaagaaaggagattcattccca

SEQ ID NO: 3031 - DNA, 104 bp, Bussuquara virus
  source 1..104: mol_type = genomic DNA
agtatttcttctgcgtgagaccattgcgacagttcgtaccggtgagttttgacttaacgcagtgagaaaagttttcgaggaaagacgagaagcgaattctctga

SEQ ID NO: 3032 - DNA, 106 bp, Zika virus
  source 1..106: mol_type = genomic DNA
agttgttgatctgtgtgagtcagactgcgacagttcgagtctgaagcgagagctaacaacagtatcaacaggtttaatttggatttggaaacgagagtttctggtc

SEQ ID NO: 3033 - DNA, 675 bp, Breda virus
  source 1..675: mol_type = genomic DNA
atcacctagtacttacaagcgggtcaaaccgccctccggaacggtcataaccccctcccgaacgtgcgcttgacgtgactggtctttcagtctagctttctgagaaatactccggggttgtaacccaccattttgacctttggtcagtttggtaacactccaaccaaacagcatctgacccacctccagcttgctgcaggccatttggaccaaacgggttcagatatcttgtggctaaacctctgacccacctccagtttactgcaggccttttggactaaacgggtacagactctttgtggttagtttttaactacccactgtttagccgccaacctgatttttattgttacaaaattttgtgtttacacattattttcttacggttggcagtttgtttggttgtttgcacagtttttgctgataccaatttttactgtgcttttggtgttttcggctaaggctgtttttcacatacttagtttgcttgaagtaaccttcacaacatctgttttgtttttggtttctaaggtaaagagtttcaggaaaaaacataggcgcccatcttgtggtgtctagttttaattaatctggcaaacaagtatcaagtcatcgactccctttggagtgagacttacgagtaccaattcgcctattttggccatccatataaaa

SEQ ID NO: 3034 - DNA, 189 bp, Porcine reproductive and respiratory syndrome virus 2
  source 1..189: mol_type = genomic DNA
atgacgtataggtgttggctctatgccttggcatttgtattgtcaggagctgtgaccattggcacagcccaaaacttgctgcacagaaacacccttctgtgatagcctccttcaggggagcttagggtttgtccctagcaccttgcttccggagttgcactgctttacggtctctccacccctttaacc

SEQ ID NO: 3035 - DNA, 312 bp, unidentified
  source 1..312: mol_type = unassigned DNA; note = PV Mahoney sequence
atgagtctggacatccctcaccggtgacggtggtccaggctgcgttggcggcctacctatggctaacgccatgggacgctagttgtgaacaaggtgtgaagagcctattgagctacataagaatcctccggcccctgaatgcggctaatcccaacctcggagcaggtggtcacaaaccagtgattggcctgtcgtaacgcgcaagtccgtggcggaaccgactactttgggtgtccgtgtttccttttattttattgtggctgcttatggtgacaatcacagattgttatcataaagcgaattggattggcc

SEQ ID NO: 3036 - DNA, 675 bp, unidentified
  source 1..675: mol_type = unassigned DNA; note = TRV NGS910 sequence
atgcgacgtggttggagattaaaccgactccgacgaaagtgctatcatgcctccccgattatgtgatgttttctgccctgctgggcggagcattctcgggttgatacaccttgaatccttcatccttggacctcaggtcccccggtctaagccgcttggaatacgacagggttattttccaatcttctcctttctactttcatgagtcctattcatgaaaagggtctgtgctgccccttccttcttggagaatctgcgcggcggtctttccgtctctcgaaaagcgcagatgcagcatgctggaaccggtgaagaaaacagttctttgtggaaacttagagcagacatcgaaacagctgtagtgacctcacagtagcagcggaaccccctcctggtaacaggagcctctgcggccaaaagccccgtggataagatccactgctgtgagcggtgcaaccccagcaccctggttcgatggttgttctctgtggaaccagagaatggtctttctcaagccctccagtagagaagccaagaatgtcctgaaggtaccccgcatgcgggatctgatcaggagaccaatcgtcagtgctttacactggcgctttggtttaaaaactgtcacagcttctccaaaccaagtggtcttggttttcacttttatcaaactgtttc

SEQ ID NO: 3037 - DNA, 625 bp, unidentified
  source 1..625: mol_type = unassigned DNA; note = AP1.0 sequence
attctcgggctacggccctggagccactccggctcctaaagatttagaagtttgagcacacccgcccactagggccccccatccaggggggcaacgggcaagcacttctgtttccccggtatgatctgataggctgtaaccacggctgaaacagagattatcgttatccgcttcactacttcgagaagcctagtaatgatgggtgaaattgaatccgttgatccggtgtctcccccacaccagaaactcatgatgagggttgccatcccggctacggcgacgtagcgggcatccctgcgctggcatgaggcctcttaggaggacggatgatatggatcttgtcgtgaagagcctattgagctagtgtcgactcctccgcccccgtgaatgcggctaatcctaaccccggagcaggtgggtccaatccagggcctggcctgtcgtaatgcgtaagtctgggacggaaccgactactttcgggaaggcgtgtttccatttgttcattatttgtgtgtttatggtgacaactctgggtaaacgttctattgcgtttattgagagattcccaacaattgaacaaacgagaactacctgttttattaaatttacacagagaagaattaca

SEQ ID NO: 3038 - DNA, 625 bp, unidentified; identical to SEQ ID NO: 3037
  source 1..625: mol_type = unassigned DNA; note = Apodemus Picornavirus 5?201 sequence

SEQ ID NO: 3039 - DNA, 277 bp, Betacoronavirus England 1
  source 1..277: mol_type = genomic DNA
atttaagtgaatagcttggctatctcacttcccctcgttctcttgcagaactttgattttaacgaacttaaataaaagccctgttgtttagcgtattgttgcacttgtctggtgggattgtggcattaatttgcctgctcatctaggcagtggacatatgctcaacactgggtataattctaattgaatactatttttcagttagagcgtcgtgtctcttgtacgtctcggtcacaatacacggtttcgtccggtgcgtggcaattcggggcacatc

SEQ ID NO: 3040 - DNA, 488 bp, Potamipivirus A; identical to SEQ ID NO: 14
  source 1..488: mol_type = genomic DNA

SEQ ID NO: 3041 - DNA, 675 bp, Cadicivirus B
  source 1..675: mol_type = genomic DNA
caccaacccttgacctgtaatgtcagtggacagagtgctcctctgttcccggttaccgtgttccaggacacgattgtaatcctgcgcctcaccagcgctgcgtgcacgtctgcataaggaaacgtgccttccccatgtctctatcaattctttggtgagtgaccgccctagttgctcatcctatgggattcttctctcatgggttctttgtggcatgcgaatgtcaccttaattggaggtctttaattagatatcctttcttcatctttgatatgagtgtcggaatttgattcctagtctctgcaaaacaaccccacttgatgaattcaacttttcaaccgcacaaacataatcaggtttttaaattgaatgtttctaaattctaaatttagtttatttaagtagtttgccatcttgactcgatgtaaaattgtcatacaagtcttcttttcttttctttacactttgaagtttgcacttagcagtcgttctgcacagctttcgagttttgtttgatcgacatcgcaacttccacccacctctctttttctagtgttgaatgcggctaatcctaacccgagagcaataaacccaggtttattgtcgtaacgcgcaagtcttggacggaaccgactatacacacacctctttaccctttagtacacccttggtacg

SEQ ID NO: 3042 - DNA, 486 bp, Bovine nidovirus TCH5
  source 1..486: mol_type = genomic DNA
caccaatagattagtcaagctgtctataggcataaactaacccccaaccccattaccccggggccaggtgggccgccgccttcgggcaaacccgtgcgctggtataatcaaggttcacagccagattcactgccggttagctagtggggcggtagcctggcaaaacccgaagaggttggaaagggaacttcagggtagtttatcctaggctagcgtagctacagttcggtcaagataaccgtcctggtgctagggctagtagagacagtggtaacttggacaagggtccagggccactttagggaataccctacggaaggctaggtccgtaaggaagacccccgcagttgtccgcggttgagcagagctcctgcgtagacaaaaggcaaaaagtggattacattcgcctgcaggaaaaggcaaacgtcgttggagtcggagctaaagtactggacgattgataccacgcctgctgcggtagataaa

SEQ ID NO: 3043 - DNA, 629 bp, Aichivirus A; identical to SEQ ID NO: 1317
  misc_feature 1..629: note = FSS693
  source 1..629: mol_type = genomic DNA

SEQ ID NO: 3044 - DNA, 675 bp, unidentified
  source 1..675: mol_type = unassigned DNA; note = EV J 1631 sequence
caccctgagggcccacgtggcgtagtactctggtatcaaggtacctttgtacgcctattttatttcccttcccccacagtaacttagaagcttatctcatagttcaacagtagggtcactaaccaagtggctcagcgaacaagcacttctgtttccccggtcctagtacctgtgaagctgtacccacggcggaaggggaaaaagatcgttatccggccccctacttcggaaagcctagtaacaccattgaagcaatcgagtgttgcgctcagcacagtaacccctgtgtagctttggttgatgagtctgggcactccccactggcgacagcggcccaggctgcgttggcggccaaccgactcgggcaaccgggtcggacgctcgtttgtggacatggtgtgaagagcctactgagctagagggtagtcctccggcccctgaatgcggataatcctaaccccggagcacccacactcaatccagagtgcaggatgtcgtaacgcgtaagtctgggacggaaccgactactttgggtgtccgtgtttcctgttttacttactttggctgcttatggtgacaatctagtgttgttaccatatagctattggattggccatccggtgttttgaattgtgtgtttatactaattcttttacatatcacagacaaccaaat

SEQ ID NO: 3045 - DNA, 270 bp, Guereza hepacivirus
  source 1..270: mol_type = genomic DNA
cactcaatactacactccgcatttggggagaagcgctggcgttcgcggaaccgcgttaaccatacgcgtagtacgagtgcgacagaccccggtgctactggtggtagcgagacacgagccgaagtctgtggggggaactccacttagagggcatgcccgggcgtaggcttctgagttgggatgggccccaacttggcccctgagtgggggggtgttacgacctgatagggtgcgggctggcgcctaccactttccagtcgtacatgagtc

SEQ ID NO: 3046 - DNA, 721 bp, Saffold virus
  source 1..721: mol_type = genomic DNA
cacttatttaattcggccttttgtgacaagcccctcggtgaaagaacctctctcttttcgacgtggttggaattgccatcatttccgacgaaagtgctatcatgcctccccgattatgtgatgttttctgccctgctgggcggagcattctcgggttgagaaaccttgaatctttttctttggaaccttggttcccccggtctaagccgcttggaatatgacagggttattttcttgatcttatttctacttttgcgggttctatccgtaaaaagggtacgtgctgccccttccttctctggagaattcacacggcggtctttccgtctctcaacaagtgtgaatgcagcatgccggaaacggtgaagaaaacagttttctgtggaaatttagagtgcacatcgaaacagctgtagcgacctcacagtagcagcggactcccctcttggcgacaagagcctctgcggccaaaagccccgtggataagatccactgctgtgagcggtgcaaccccagcaccctggttcgatgatcattctctatggaaccagaaaatggttttctcaagccctccggtagagaagccaagaatgtcctgaaggtaccccgcgtgcgggatctgatcaggagaccaattggcggtgctttacactgtcactttggtttaaaaattgtcacagcttctccaaaccaagtggtcttggttttccaattttgttga

SEQ ID NO: 3047 - DNA, 674 bp, Saffold virus
  misc_feature 1..674: note = 3?47
  source 1..674: mol_type = genomic DNA
cacttatttaattcggccttttgtgacaagcccctcggtgaaagaacctctctcttttcgacgtggttggaattgccatcatttccgacgaaagtgctatcatgcctccccgattatgtgatgttttctgccctgctgggcggagcattctcgggttgagaaaccttgaatctttttctttggaaccttggttcccccggtctaagccgcttggaatatgacagggttattttcttgatcttatttctacttttgcgggttctatccgtaaaaagggtacgtgctgccccttccttctctggagaattcacacggcggtctttccgtctctcaacaagtgtgaatgcagcatgccggaaacggtgaagaaaacagttttctgtggaaatttagagtgcacatcgaaacagctgtagcgacctcacagtagcagcggactcccctcttggcgacaagagcctctgcggccaaaagccccgtggataagatccactgctgtgagcggtgcaaccccagcaccctggttcgatgatcattctctatggaaccagaaaatggttttctcaagccctccggtagagaagccaagaatgtcctgaaggtaccccgcgtgcgggatctgatcaggagaccaattggcggtgctttacactgtcactttggtttaatgttga

SEQ ID NO: 3048 - DNA, 726 bp, Saffold virus
  misc_feature 1..726: note = Kozak
  source 1..726: mol_type = genomic DNA
cacttatttaattcggccttttgtgacaagcccctcggtgaaagaacctctctcttttcgacgtggttggaattgccatcatttccgacgaaagtgctatcatgcctccccgattatgtgatgttttctgccctgctgggcggagcattctcgggttgagaaaccttgaatctttttctttggaaccttggttcccccggtctaagccgcttggaatatgacagggttattttcttgatcttatttctacttttgcgggttctatccgtaaaaagggtacgtgctgccccttccttctctggagaattcacacggcggtctttccgtctctcaacaagtgtgaatgcagcatgccggaaacggtgaagaaaacagttttctgtggaaatttagagtgcacatcgaaacagctgtagcgacctcacagtagcagcggactcccctcttggcgacaagagcctctgcggccaaaagccccgtggataagatccactgctgtgagcggtgcaaccccagcaccctggttcgatgatcattctctatggaaccagaaaatggttttctcaagccctccggtagagaagccaagaatgtcctgaaggtaccccgcgtgcgggatctgatcaggagaccaattggcggtgctttacactgtcactttggtttaaaaattgtcacagcttctccaaaccaagtggtcttggttttccaattttgttgaccgcc

SEQ ID NO: 3049 - DNA, 675 bp, Simian Sapelovirus 1
  source 1..675: mol_type = genomic DNA
ccaaggatctgttgcataggcgttgtatcccctaaccttttacctacccatcccaataggactggtatttcggttttgattgagtaatggatactgattctatacctgttacccattcaggggaaaaatggagtttctttcatggatctgacttgatatgaccaagagtcaacactttgcgtgttggccgtatggaatgctttaaggtttattctttggattatgacttcagggttggccgcccaggataaaaggcaattgtggtaagtgatgttagtcattggtggttgaaacctgcctaagacgtcctaggtctacgctgtgcgggccgaagtaagcttaggaataacagggagtatgccattttctgctttcacccaacacgaccgtacacgaaagagctagaggcactttggggcaaagggaaaagctttgcttagcccgaatgttcatttgagtccttgacgaatgcgtcccgtctgtcccgacggtgaggcgtatggcgcatgctcatggcattacccaatggtgtatctgtgaggggggggctcctcacacttagtctagtgctacctgacagggccgcggctggtcgtttgtgtatggtataaccagtagtaatcccccatggattgctttaacttcccctcctcccttaccaagacattctctaag

SEQ ID NO: 3050 - DNA, 675 bp, unidentified
  source 1..675: mol_type = unassigned DNA; note = A105-675 sequence
ccacccacagcaagaatgccatcatctgtcctcacccccatttctcccctccttcccctgcaaccattacgcttactcgcatgtgcattgagtggtgcacgtgttgaacaaacagctacactcacgtgggggcgggttttcccgcccttcggcctctcgcgaggcccacccttccccttcctcccataactacagtgctttggtaggtaagcatcctgatcccccgcggaagctgctcgcgtggcaactgtggggacccagacaggttatcaaaggcacccggtctttccgcctccaggagtatccctgctagtgaattctagtggggctctgcttggtgccaacctcccccaaatgcgcgctgcgggagtgctcttccccaactcaccctagtatcctctcatgtgtgtgcttggtcagcatatctgagacgatgttccgctgtcccagaccagtccagcaatggacgggccagtgtgcgtagtcgtcttccggcttgtccggcgcatgtttggtgaaccggtggggtaaggttggtgtgcccaacgcccgtactttggtgacaactcaagaccacccaggaatgccagggaggtaccccgcctcacggcgggatctgaccctgggctaattgtctacggtggttcttcttgcttccatttctttcttctgttc

SEQ ID NO: 3051 - DNA, 513 bp, Porcine Kobuvirus; identical to SEQ ID NO: 1446
  misc_feature 1..513: note = XX
  source 1..513: mol_type = genomic DNA

SEQ ID NO: 3052 - DNA, 675 bp, unidentified
  source 1..675: mol_type = unassigned DNA; note = Turkey Gallivirus M176 sequence
ccactcgcacttcctggatagtgcgttagatatgcccgacatatcgcttccaggaccaaagccccccttttctctttcccaaccagcttcgccactcaagctgtaattccatgtccggtctttccggccttagtatcatggaaatgtggtcgtgctcaaatgaaattgagttgacattgatcaatgaaagttgcactgaactttgctaaactggctagcgccacctggtgtgtgccgttggtctcctcacatggtaacatgtgccaacgggcccgaaaggctagtgggcaattaccgctccaagggaggggtacccaccccgacctgaacagcggtaatgaagctcacctcccaggctctgaccccgagaagtttagttatttagtaggtgtaattagtacttgtgattggtcaatttgatagtagtttgaaacgttatggatgaatgagtagaccccctgaaggtaccccattacatgggatctgatcagggccacattctgcgtgtctccccgcacttgtggttaaaaccatgaaagttcatcccaaacaatcttttcctcttctttttcttttagtggtgacaacctactggattggtgattaccaatctgtactagtgttgtattaagacttgttgtgtggagaaaatggactctttcaagaagatttttg

SEQ ID NO: 3053 - DNA, 675 bp, unidentified
  source 1..675: mol_type = unassigned DNA; note = Rosavirus 2 GA7403 sequence
ccaggcatggcgttaaacatgcattcccttcccctagtaacctcccttcgccccttccccacgttgtaccccctccgagatggctgctaaggcgcttgctgctacagcagtctcgtgtttcgggtgttataagtgctttcttttccactccactccctgcctatggggagcggaacggccttgtctcggtcgttgcttcttgcagatcttcacccctccaggctttctggactcgccaggggtggagtagtaggcgcactgtctaagtgaaggtagcagtgttgttggcgaagagttgtggacctactttgagtttgtagcgatcatccagagctagcggatctccccacgcggtaacgcgtgcctctaggcccaaaaggcacggtgttcacagcaccctttggatggcgggggtgcccccctccgcacttaaagtagaaaaacagcttagtagtcaaataacatggctttcctcaagcattcagtgctacatgggactgaaggatgcccagaaggtacccgcaggcaacgataagctcactgtggatctgatctggggccctgggccaggtgctatacacctggttaaaaccaaatctggtagtcagggttaaaaaacgtctaagtcccacccccccggggacggggggttcccttaaaccctcaactgacacc

SEQ ID NO: 3054 - DNA, 293 bp, Bovine hepacivirus
  source 1..293: mol_type = genomic DNA
ccatcgacactccaggctcacggattaagttaggttccgccgaagcgggctaaccaggcccctagtaggaggcgcctatcccgtgagccctttccccacggattgagtggagctggagctgggaaggaccgagtacggtccaatcgagaagaaccctgatgaacattccaggcctcttcggtagatttggatatatccaccagtgaaggcggggtcgtgggtacaggccccctagtccacacagcctgatagggtcctgccgcaggatccgtgggtgcggctgtacatgtacc

SEQ ID NO: 3055 - DNA, 675 bp, unidentified
  source 1..675: mol_type = unassigned DNA; note = 18-675 sequence
cccacagcaagaatgccatcatctgtcctcacccccaattttcccttttcttcccctgcaaccattacgcttactcgcatgtgcattgagtggtgcatgtgttgaacaaacagctacactcacatgggggcgggttttcccgccctacggcctctcgcgaggcccaccccttccctccccttataactacagtgctttggtaggtaagcatcctgatcccccgcggaagctgctcacgtggcaactgtggggacccagacaggttatcaaaggcacccggtctttccgccttcaggagtatccctactagtgaattctagcggggctctgcttggtgccaacctcccccaaatgcgcgctgcgggagtgctcttccccaactcaccctagtatcctctcatgtgtgtgcttggtcagcatatctgagacgatgttccgctgtcccagaccagtccagtaatggacgggccagtgcgtgtagtcgtcttccggcttgtccggggcatgtttggtgaaccggtggggtaaggttggtgtgcccaacgcccgtactttggtgacacctcaagaccacccaggaatgccagggaggtaccccacctcacggtgggatctgaccctgggctaattgtctacggtggttcttcttgcttccacttctttcttctgttcacg

SEQ ID NO: 3056 - DNA, 562 bp, Encephalomyocarditis virus
  misc_feature 1..562: note = pEC9
  source 1..562: mol_type = genomic DNA
ccccccccctaacgttactggccgaagccgcttggaataaggccggtgtgcgtttgtctatatgttattttccaccatattgccgtcttttggcaatgtgagggcccggaaacctggccctgtcttcttgacgagcattcctaggggtctttcccctctcgccaaaggaatgcaaggtctgttgaatgtcgtgaaggaagcagttcctctggaagcttcttgaagacaaacaacgtctgtagcgaccctttgcaggcagcggaaccccccacctggcgacaggtgcctctgcggccaaaagccacgtgtataagatacacctgcaaaggcggcacaaccccagtgccacgttgtgagttggatagttgtggaaagagtcaaatggctctcctcaagcgtattcaacaaggggctgaaggatgcccagaaggtaccccattgtatgggatctgatctggggcctcggtgcacatgctttacatgtgtttagtcgaggttaaaaaacgtctaggccccccgaaccacggggacgtggttttcctttgaaaaacacgatgataat

SEQ ID NO: 3057 - DNA, 654 bp, Mosavirus A2
  misc_feature 1..654: note = SZAL6
  source 1..654: mol_type = genomic DNA
cccccccctcaaattgcaacgatatagctaatggcgagattgagatgctatatcacctcttctaagttatagacctcatctgattgataaggacgtaatttggtcgaaaccgcttggaataagaccgatgcgcgtagtcatgatgatgatgtaagatctaggaacttatccaatctgcttatgtctatgtaagtagaggggcaggcctcattgccctaattctttctaccgagtatctgctagggtttctagcggcttgaatacttggattgagggatacaagatactactgatcgattgtcgattgggaaacttgtagatacttcaaagctaccagtagcgtggactcacagccagcggactacccctcatggtaacatgagcctctgggcccacaaggcacgtcgcaagacctgtgagacggcaaccccagcctagctttgttgaggaaacaagcgataacatgacatgagagaccggaaggattcttgtattgtgagccgaaggatggcctctaggtacctcattttatgagatctgaggaggtgctcttgagttggtgctttacactgacaacacagagttaaaaagcgtctaagctcacccggaaattgggaaatttccgttatttccattttgtttgcaaagtcgttc

SEQ ID NO: 3058 - DNA, 608 bp, Bourbon virus
  source 1..608: mol_type = genomic DNA
ccccccctacttaaagatgtacggttttgctgctttcacagagtaaagcagatagaggttctgaactggcaaactttacctcgaaacacgcccgtttttctgctgtgtctcacagactgtcctgtcacacttgtggcggcttgtgacactgtgaacatagtgagaccgaccaagacaacagtttcaagtgatgaacatcgaacgtctaaactggatccgtaactggacatgttagggcaaggacttcccccctggtaacaggagcctggctggccaaaagccccgctcattgagcctagcatgttgtcgaccctggactgttcagtttagttagtacatggaattcacttgtcacggttcttctgaactcggtctctagtatgacagcctaaggatgccctccaggtaccccggggtaacaagtgacacccgggatctgaggaggggactactttacgtagtttaaaaaacgtctaagctgttatggtgaccagaggctggcacctttcacttttaaaattacactactgactacaattgaagtgataacggttttacaggctttcaaactagttacacaagcactgttttcctgacacacacacttt

SEQ ID NO: 3059 - DNA, 585 bp, Encephalomyocarditis virus
  misc_feature 1..585: note = A
  source 1..585: mol_type = genomic DNA
cccccctctccctccccccctaacgttactggccgaagccgcttggaataaggccggtgtgcgtttgtctatatgttattttccaccatattgccgtcttttggcaatgtgagggcccggaaacctggccctgtcttcttgacgagcattcctaggggtctttcccctctcgccaaaggaatgcaaggtctgttgaatgtcgtgaaggaagcagttcctctggaagcttcttgaagacaaacaacgtctgtagcgaccctttgcaggcagcggaaccccccacctggcgacaggtgcctctgcggccaaaagccacgtgtataagatacacctgcaaaggcggcacaaccccagtgccacgttgtgagttggatagttgtggaaagagtcaaatggctctcctcaagcgtattcaacaaggggctgaaggatgcccagaaggtaccccattgtatgggatctgatctggggcctcggtgcacatgctttacatgtgtttagtcgaggttaaaaaacgtctaggccccccgaaccacggggacgtggttttcctttgaaaaacacgatgataatatggccacaacc

SEQ ID NO: 3060 - DNA, 457 bp, Crohivirus B
  misc_feature 1..457: note = 5?51
  source 1..457: mol_type = genomic DNA
ccccccttttccccagccatgggttaaatggcaataaaggacgtaacaactttgtaaccattaagctttgtaattttgtaaccactaagctttgtgcacataatgtaaccatcaagcttgttagtcccagcaggaggtttgcatgcttgtagccgaaatggggctcgaccccccatagtaggatacttgattttgcattccattgtggacctgcaaactctacacatagaggctttgtcttgcatctaaacacctgagtacagtgtgtacctagaccctatagtacgggaggaccgtttgtttcctcaataaccctacataataggctaggtgggcatgcccaatttgcaagatcccagactgggggtcggtctgggcagggttagatccctgttagctactgcctgatagggtggtgctcaaccatgtgtagtttaaattgagctgttcatatacc

SEQ ID NO: 3061 - DNA, 436 bp, unidentified
  source 1..436: mol_type = unassigned DNA; note = GB virus C/Hepatitis G virus sequence
cccccggcactgggtgcaagccccagaaaccgacgcctatctaagtagacgcaatgactcggcgccgactcggcgaccggccaaaaggtggtggatgggtgatgacagggttggtaggtcgtaaatcccggtcaccttggtagccactataggtgggtcttaagagaaggttaagattcctcttgtgcctgcggcgagaccgcgcacggtccacaggtgttggccctaccggtgggaataagggcccgacgtcaggctcgtcgttaaaccgagcccgttacccacctgggcaaacgacgcccacgtacggtccacgtcgcccttcaatgtctctcttgaccaataggcgtagccggcgagttgacaaggaccagtgggggccgggggcttggagagggactccaagtcccgcccttcccggtgggccgggaaatgc

SEQ ID NO: 3062 - DNA, 655 bp, Caprine kobuvirus
  misc_feature 1..655: note = d20
  source 1..655: mol_type = genomic DNA
ccccctcaccctcttttccggtggccacgcccgggccaccgatacttcccttcactccttcgggactgttggggaggaacacaacagggctcccctgttttcccattccttcccccttttcccaaccccaaccgccgtatctggtggcggcaagacacacgggtctttccctctaaagcacaattgtgtgtgtgtcccaggtcctcctgcgtacggtgcgggagtgctcccacccaactgttgtaagcctgtccaacgcgtcgtcctggcaagactatgacgtcgcatgttccgctgcggatgccgaccgggtaaccggttccccagtgtgtgtagtgcgatcttccaggtcctcctggttggcgttgtccagaaactgcttcaggtaagtggggtgtgcccaatccctacaaaggttgattctttcaccaccttaggaatgctccggaggtaccccagcaacagctgggatctgaccggaggctaattgtctacgggtggtgtttcctttttcttttcacacaactctactgctgacaactcactgactatccacttgctctcttgtgcctttctgctctggttcaagttccttgattgtttttgactgcttttcactgcttttcttctcacaatccttgctcagttcaaagtc

SEQ ID NO: 3063 - DNA, 604 bp, Acute bee paralysis virus
  source 1..604: mol_type = genomic DNA
cccgtcaaaataacaacttataacacgatgttacccgaagaaaccattttagtgtaacatttaagattagaagtagttcatctaatagagataggcactattagaaggaggccttttctaaaggagccgttagtcagcccagacaagcgcagtactttagaagagagaagttccccgatagcgaccgaaaagacgcgttttccgtgctaactaatttaaatgtgggaacgaatattattattgaaattatgtgagccacgtagcaatcaagtcatgtttttgtcactacgtttactcatctaatgtagataattttgtttaagtacctatttaggtgtcatcccaccagagaagaaataatacgtaccggaacccagagtacaccccttattttaagccttactgggcttctctgttagttagtaatctggcccacgttttgcgttgagtggggtcccaacagtaggaattcgacggacaagtagcaagcgagtcggtaccaattggtttagccttcgaaattactctgggcaggaagttactaaacgagaactttctgcttaaatcccaacgcacaaacaaatagagtaaataaataattata

SEQ ID NO: 3064 - DNA, 675 bp, Niviventer confucianus picornavirus
  source 1..675: mol_type = genomic DNA
ccctttcataaccccccccttttaacccaacccttcgtaaccgtacgcttcactcgcctttgggtatagcggcccaatgtgctgaagaaaaggatacgctataaggggccaacgggtggtggcccttaagaccacccaacctagaagcttgtacactcgggcaatagtgaggcccacatccagtgggtcaagcccaaagcattcttgttccccggtatgatctcataagctgtacccacggctgaaagagtgattatcgttatcccactcagtacttcggagagcctagtacaccacttggaaatggaagtctgtgatccggggttgaccctgaaccccagaaactcatgatgaggctaaccttcccgaacacggcgacgtgtggttagcctgcgctggcatgaggcctctttgtaggcagactgaaatggaagggtgacgaagagccgactgagctactgttttattcctccggccccctgaatgcggctaatcctaactcctggtccagtacttgtaacccaacaggtggctggtcgtaatgcgtaagccgggagcggaaccgactactttggggcgtccgtgtttctcaatattattcatttctagcttatggtgacaatttatgattgcagagattgtgctgtatttgtgtctgagagaagaagtaacaat

SEQ ID NO: 3065 - DNA, 551 bp, Rabovirus A
  misc_feature 1..551: note = NYC-B10
  source 1..551: mol_type = genomic DNA
ccgaccccactggtcgaaggccacttggcaataagactggtggaacaaggtcgcctgtagttgattggaaccttctttctaatgacttatgtcagcggtgctactcacaccgtaactctcctaccctatccccacgcttgtggaactaggaggggatgagtgattcaagtaagtactgtcagaatggtgaaaataatctgattctgaaacgctatggatccatcgaaagatggggctacacgcctgcggaacaacacatggtaacatgtgccccaggggccgaaagccacggtgataggatcacccgtgtagtttgagatcatatcaatgttcatagtctagtaagatgatttgaaatctaactggtctgatggctaactgcttgtcttattgcggcctaaggatgtcctgcaggtacctttagagaaccttaagagactattgatctgagcaggagccaaggtggtctttcccagccttggttaaaaagcgtctaagccgcggcagggggcgggaggccccctttcctcccaaactataatatagattgt

SEQ ID NO: 3066 - DNA, 625 bp, Caprine kobuvirus
  misc_feature 1..625: note = d50
  source 1..625: mol_type = genomic DNA
ccgggccaccgatacttcccttcactccttcgggactgttggggaggaacacaacagggctcccctgttttcccattccttcccccttttcccaaccccaaccgccgtatctggtggcggcaagacacacgggtctttccctctaaagcacaattgtgtgtgtgtcccaggtcctcctgcgtacggtgcgggagtgctcccacccaactgttgtaagcctgtccaacgcgtcgtcctggcaagactatgacgtcgcatgttccgctgcggatgccgaccgggtaaccggttccccagtgtgtgtagtgcgatcttccaggtcctcctggttggcgttgtccagaaactgcttcaggtaagtggggtgtgcccaatccctacaaaggttgattctttcaccaccttaggaatgctccggaggtaccccagcaacagctgggatctgaccggaggctaattgtctacgggtggtgtttcctttttcttttcacacaactctactgctgacaactcactgactatccacttgctctcttgtgcctttctgctctggttcaagttccttgattgtttttgactgcttttcactgcttttcttctcacaatccttgctcagttcaaagtc

SEQ ID NO: 3067 - DNA, 675 bp, Cosavirus A
  misc_feature 1..675: note = SH1
  source 1..675: mol_type = genomic DNA
ccgtgctttacacggtttttgaaccccacaccggctgtttggcgcttgcaggacagcaggtttattttcttatgctctttatttctagccaacagggttctatcctgttgggcggagtgatactcccgttccttcttggacagattgcctccacgatctttgtggatctcaaggtgatcaagtcactggtaaatagagcgaaggttgaggaaacctgaggaatttccatgtggttttgccaggagttgtagcgatgctgtgtgtgtgtgcggatttcccctcatggcaacatgagcctcacaggccaaaagccctgtccgaaaggacccacacagtggagcaatcccagctccctcctacaaagctttgtgagaatgaactcacgtttattcttctttattctctgtttacatcaggccccaaagatgtcctgaaggtaccttgtgtatctgggcatgagcaccatcaactacccggacttgcatttcggtgcagacacatgtggttacccagcccctctgctttggcagaggggcttttgctcgctcagcacgagatctgatcaggagcccttcccagtgtgctttacacctggcggggggttaaaaattgcccaaggcctggcaaaataacctaggggactaggttttccttttattaacaatgtctgtcatt

SEQ ID NO: 3068 - DNA, 675 bp, unidentified
  source 1..675: mol_type = unassigned DNA; note = Kobuvirus SZAL6 sequence
cctacccaagggttacatgggaccatattcctcctcccctgtaactttaagttttgtgcccgtattcttgactccaggcggatgttgtgtcgcccgtcctgtgaacaaacagctagacactttcctcccctccctctgggctgctccggcagtccactccctccccccagcgtaacatgccccgctggagtgatgcacctggaagtcgtggacgtgggttagtaacttcggtgaaaacccactataatgacaactggttgacccccacactcaaaggactcgagtctttctcccttaaggctagcccggccacatgaatttgcagctggcaactagtgagtccaccatgtcccgcaacctcggctgcggagtgctgttccccaagcgtatgccttccttctgtaagagtgcgcctggcaagcacatctgagaagtcgttccgctgcgtcgtgccaacctggcgacaggtgacccagtgtgcgtagacttcttccggattcgtccggctcttctctaggaaacatgcgtgtaaggttcatgtgccaaagccctgcgcgcggtgttcttctactgccctaggaatgtgccgcaggtacccctacttcggtagggatctgagcggtagctaattgtctacgggtagtttcatttccatcttctcttcaggtcgacatc

SEQ ID NO: 3069 - DNA, 636 bp, unidentified; identical to SEQ ID NO: 67
  source 1..636: mol_type = unassigned DNA; note = Oscivirus sequence

SEQ ID NO: 3070 - DNA, 675 bp, Saffold virus
  misc_feature 1..675: note = 5?46
  source 1..675: mol_type = genomic DNA
cctctctcttttcgacgtggttggaattgccatcatttccgacgaaagtgctatcatgcctccccgattatgtgatgttttctgccctgctgggcggagcattctcgggttgagaaaccttgaatctttttctttggaaccttggttcccccggtctaagccgcttggaatatgacagggttattttcttgatcttatttctacttttgcgggttctatccgtaaaaagggtacgtgctgccccttccttctctggagaattcacacggcggtctttccgtctctcaacaagtgtgaatgcagcatgccggaaacggtgaagaaaacagttttctgtggaaatttagagtgcacatcgaaacagctgtagcgacctcacagtagcagcggactcccctcttggcgacaagagcctctgcggccaaaagccccgtggataagatccactgctgtgagcggtgcaaccccagcaccctggttcgatgatcattctctatggaaccagaaaatggttttctcaagccctccggtagagaagccaagaatgtcctgaaggtaccccgcgtgcgggatctgatcaggagaccaattggcggtgctttacactgtcactttggtttaaaaattgtcacagcttctccaaaccaagtggtcttggttttccaattttgttga

SEQ ID NO: 3071 - DNA, 675 bp, unidentified
  source 1..675: mol_type = unassigned DNA; note = EV22 sequence
ccttataacccgacttgctgagcttctataggaaaaaaccctttcccagccttggggtggctggtcaataaaaacccccatagtaaccaacacctaagacaatttgatcaaccctatgcctggtccccactattcgaaggcaacttgcaataagaagagtggaacaaggatgcttaaagcatagtgtaaatgatcttttctaacctgtattatgtacagggtggcagatggcgtgccataaatctattagtgggataccacgcttgtggaccttatgcccacacagccatcctctagtaagtttgtaaaatgtctggtgagatgtgggaacttattggaaacaacaatttgcttaatagcatcctagtgccagcggaacaacatctggtaacagatgcctctggggccaaaagccaaggtttgacagacccattaggattggtttcaaaacctgaattgttgtggaagatattcagtacctatcaatctggtagtggtgcaaacactagttgtaaggcccacgaaggatgcccagaaggtacccgcaggtaacaagagacactgtggatctgatctggggccaactacctctatcaggtgagttagttaaaaaacgtctagtgggccaaacccaggggggatccctggtttccttttattgttaatattgacatt

SEQ ID NO: 3072 - DNA, 675 bp, Coxsackievirus B5
  source 1..675: mol_type = genomic DNA
cctttgtgcgcctgttttatgcccccttcccccaattgaaacttagaagttacacacaccgatcaacagcgggcgtggcataccagccgcgtcttgatcaagcactcctgtttccccggaccgagtatcaatagactgctcacgcggttgaaggagaaaacgttcgttacccggctaactacttcgagaaacctagtagcatcatgaaagttgcgaagcgtttcgctcagcacatccccagtgtagatcaggtcgatgagtcaccgcattccccacgggcgaccgtggcggtggctgcgttggcggcctgcctacggggcaacccgtaggacgcttcaatacagacatggtgcgaagagtcgattgagctagttagtagtcctccggcccctgaatccggctaatcctaactgcggagcacataccctcaacccagggggcattgtgtcgtaacgggtaactctgcagcggaaccgactactttgggtgtccgtgtttccttttattcttataatggctgcttatggtgacaattgaaagattgttaccatatagctattggattggccatccggtgtctaacagagctattatatacctctttgttggatttgtaccacttgatctaaaggaagtcaagacactacaattcatcatacaattgaacacagcaaa

SEQ ID NO: 3073 - DNA, 675 bp, unidentified
  source 1..675: mol_type = unassigned DNA; note = Icavirus sequence
cgaagtttaagctaagcaccctcgggcgttcccggattatgtgatcacatcaatttgatggctggtcaccacgcaacgcctggagagatactcttacttttctcttaagatccccggtcatttgacgcttgtaggatgatagggttattttccactataaatactttcatactcttggatgttctatatccaagacgggaggacctaccccgtaccccttagaggtgagatgccaagaacaggccctttctgttctctcgacaatggcatcataggcaacaagcatcacaccaagattgctaagttttgttaagagttcttcaagctatagggtggctgtagcgaccttctgatgcctgcggatttccccacggagcgatccgtgccacaggggccaaaagccacggctaacgcccatcaggagcggcacttaccccgtgccccacccttgaaacttgaatgttcacactggcttctctcggctttctgaactgtctgcttgttggggccccgaaggatgccctggaggtaccccattttatgggatctgaccaggggacacctcagctctctaagttgctggtgtttaaaaaacgtctaagggcccccaccccttaggtggagggatccacctttcctttattttttaaaactcttttatggtcacaattgttt

SEQ ID NO: 3074 - DNA, 675 bp, Equine rhinitis B virus 1
  source 1..675: mol_type = genomic DNA
cgacaggcacaggtcgctccgagttctagtagtgtgggaacttgttactactgatgaaacgaggtagtgacactcagtacctgcgaacgaggtcggggccctcccttcttccttcacccaactttcacttttcgttccactttagcaggggtcttctttctatccccctggcggcattggaactagccgtcgcgtcttaacgcgcagccctgaaggccccacaccttgtggatcttgccgtgggtatgtttctggcatgtgtttctcaagcctgcaaccgaagccgaacagccacatgaacagtttgagcgtggtagcgctgtgtgagttggcggtggatccccctcgtggtaacacgagcccccgtggccaaaagcccagtgtttacagcacctctcacatccaggacgaccccatcctggcgctcactcttagtagtatggcttagtacgcattaggtggtaagccgagctctccctcggccttgttctgaatgcacacatgtctaggggctaaggatgtcctacaggtacccgcacgtaaccttcagagagtgcggatctgagtaggagaccgtggtgcactgctttacagatgcagcccggtttaaaaagcgtctatgcccctacagggtagcggtgggccgcgccctttccttttaaaactacttgttct

SEQ ID NO: 3075 - DNA, 675 bp, unidentified
  source 1..675: mol_type = unassigned DNA; note = HAV HM175 sequence
cgccgtttgcctaggctataggctaaattttccctttcccttttccctttcctattccctttgttttgcttgtaaatattgatttgtaaatattgattcctgcaggttcagggttcttaaatctgtttctctataagaacactcatttcacgctttctgtcttctttcttccagggctctccccttgccctaggctctggccgttgcgcccggcggggtcaactccatgattagcatggagctgtaggagtctaaattggggacacagatgtttggaacgtcaccttgcagtgttaacttggctttcatgaatctctttgatcttccacaaggggtaggctacgggtgaaacctcttaggctaatacttctatgaagagatgccttggatagggtaacagcggcggatattggtgagttgttaagacaaaaaccattcaacgccggaggactgactctcatccagtggatgcattgagtggattgactgtcggggctgtctttaggcttaattccagacctctctgtgcttggggcaaacatcatttggccttaaatgggattctgtgagaggggatccctccattgccagctggactgttctttggggccttatgtggtgtttgccgctgaggtactcaggggcatttaggtttttcctcattcttaaataata

SEQ ID NO: 3076 - DNA, 675 bp, Canine picodicistrovirus
  misc_feature 1..675: note = strain 209
  source 1..675: mol_type = genomic DNA
cgctctttatacaaatctgtcaaccctttgtataactctaagccgaacaattatagctaggctttttattatataacattaattaggcattagcgttgtcgccaatctcttggtaatcctaaggatacctttcctgttgactaagatgaagcgccttcggttaccgatgcccggtgtccacgaagccatcgtggtcggccgcgtcccccacctctcccaacttggactccatgttttcagtaggtgtaatgattagtattattgattctgctcgttcaatgtgtttatcttcacgatctgggacccaacacatgcttcactcatgtttaaatgttggttccctcattttgaagacacccaaaccatagagtgcgagaatgaggatttctacttccattctggtaacagaaatgaattcctgcgtgtgtctcgtaaatggaatctttaagaacttcagataaatcgaacaatacactaatacaagttgttttctaccaacatgttcaatgcggctaatctgaccgtggagctgtgaagcgctcaaacccgagtgttgtatacagtcgtaatgcgtaagtccatgaggaaccgactactgttacctctgttggtgtgtttctcctttcctctcttttattattatttgttattgcaaatactacaactttgatcaac

SEQ ID NO: 3077 - DNA, 675 bp, Falcon picornavirus
  source 1..675: mol_type = genomic DNA
cgcttggaataagttgagaggaattatgcatgctagttgtgtttgtttacaactaattgttctaatccaagtgaagctcttcgcttggggcggcacgacacttgccgtaattcttctaccgtccctccacaccttgtggatgaagggccggatgtgtggcctctggctaacccctctctctggggtgatgctactggatgttttactcctagaccaaatcacatgaactcctcttgatccacttcggtggggctatgagcctgcggattaatagctggcgacagctaccccaggggccaaaagccacggtgttagcagcaccctcatagtctgatgcccaagggctgatgttgggagctagtagtgtgtgtctggcctatgtttaggacttctggccaagcgcagaggagtggggctgaaggatgcccagaaggtacccgtaggtaaccttaagagactatggatctgatctggggccccctcacgtggctttaccacgtgttgggggttaaaaaacgtctaggccccaccagcccacgggagtgggctttcccttaaaaagcccaacaatatttatggtgacaattcactgtttcttctttgcaatttttgtattcttggactccttattttttgtttgcttgattttagtggacattcagattcaaatacaaa

SEQ ID NO: 3078 - DNA, 245 bp, Wobbly possum disease virus
  source 1..245: mol_type = genomic DNA
cggctgtgagtgcttagcatatgctagagtactacagccgggtgttggagtcatatgcactggttgcctgtataatagtcgggatctgtctgacctacattatctttgggagttgcttatcacgacaattctcgaagtgtctgtcgacagcttacccccgattcgacaaggccccttgtccaccgcagacctatcgattttcaacgagaacactatcagaggtttaaatttaaaactcaccaaca

SEQ ID NO: 3079 - DNA, 675 bp, unidentified
  source 1..675: mol_type = unassigned DNA; note = EV J N125 sequence
cggtacctttgtacgcctattttacccccttccccttgtaacttagaagcaaagcaaaccagttcaatagtaagcaacacaacccagtgttgtgacgaacaagtacttctgtttccccgggagggtctgacggtaagctgtacccacggctgaagtatgacctaccgttaaccggctacctacttcgagaagtctagtaataccattgaagttttgttggcgttacgctcaacacactaccccgtgtgtagttttggctgatgagtcacggcattccccacgggcgaccgtggccgtggctgcgttgcggccaaccaaggggcgcaagctccttggacgtcacttaacagacatggtgtgaagaacctattgagctaggtagtagtcctccggcccctgaatgcggctaatcctaactccggagcacatcagtgcaacccagcatttggtgtgttgtaatacgcaagtctggagcggaaccgactactttgggtgtccgtgtttcctgttttaccttatttggctgcttatggtgacaatttgatattgttaccatatagctgttggattggccatccggatttttgaaagagacccaaaactttcttctctacttcagattcaagtgcgaagttttccttttcatatattacttactaatttgaagtaccaaag

SEQ ID NO: 3080 - DNA, 675 bp, Parechovirus C
  source 1..675: mol_type = genomic DNA
cggtcatccccctttccccacagccggtgtgggttctaatcggctcctactaaacacctaagcatcactgcgcctctatctctcctatccacaggtctaagacgcttggaataagacatgtgggtgcaataggaagattagctagtccaatctctccttccagctacgcttctcccttcgatgagcgtagggggggcccccacctccctcatctctggatagggctcttgctacggggctttcccgtctggaccagcaggcccactggtgcgcttccattcaagtttagtgtgcattactgtctgaaatattgctttgctaggatctagtgtagcgacctgcatattgccagcggacttccccacatggtaacatgtgcctctgggcccaaaaggcatgtctttgaccgtatgcagtacaaccccagtataggtcctttctatggcagtatggatctcagtgatgagtctatacagaatatggaagtggttcggatatgtcagcccgaaggatgcccagaaggtacccgcagataaccttaagagactgtggatctgatctggggcccaccaccttcgggtgggtagaagctaaccatgccttgggttaaaaaacgtctaagggctgaccagacccgggggatccgggttttccctatcttgacctactctaatc

SEQ ID NO: 3081 - DNA, 675 bp, Cosavirus B1
  source 1..675: mol_type = genomic DNA
cgtgctttacacggtttttgaaccccacaccggctgtttggcgcttgcaggacagcaggtttattttcttttaactctctctttctagccacacacgatctatgtgtgtgggcggagtgatactcccgttccttcttggacaggcggcctccacgccctttgtggatcttaaggctaccaagtcactggtgttggaaagtgaagagaaaggagttccttgggaactacatgtggcattgacagaggttgtagcgatgctgtgtgtgtgtgcggattacccccgtggcgacacggaccccacaggccaaaagccctgtccgaaaggacccacacagtggagcaaccccagctcccctcttcaatgttttgtgttagcaaccttggtattattttctctcaagcttccaatacaccgggccccaaagatgtcctgaaggtaccccgtgtatctgaggatgagcaccatcaactacccggacttgttctttcgagaacagacgcatgtggtaacccagccccgatcctaaggggtcggggcttttgctcactcagcacaggatctgatcaggagacctcccccccctgctttacagggggcgggggtttaaaaattgcccaaggcctggcaaataacctaggggactaggttttcctttttattttaaagttgtcaat

SEQ ID NO: 3082 - DNA, 675 bp, Cosavirus D1
  source 1..675: mol_type = genomic DNA
cgtgctttacacggtttttgaaccccacaccggctgtttggcgcttgcaggacagtaggtatattttctttcatttctcttttctagccgcgtaggttctatctacgcgggcggagtgatactcccgctccttcttggacaggcggcctccacgctctttgtggatcttaaggctgccaagtcactggtgtttgaagtgaagaatggagagacactagggcgtttcatgtggctttgccagggattgtagcgatgctgtgtgtgtgtgcggatttcccctcgtggcgacacgagcctcacaggccaaaagccctgtccgaaaggacccacacagtggggttgccccgacccctcccttcaaagctttgtgtaaacaaacttttgtttagactttcttaagcttctctcacatcaggccccaaagatgtcctgaaggtaccctgtgtatctgaggatgagcaccaccaactacccggacttgtgggacgtgtcccacagacgcatgtggtattccagccccctccttttgaggagggggcttttgctcgctcagcacaggatctgatcaggagattcatctctggtgctttacaccagagcatggatttaaaaattgcccaaggcctggcaaacaacctaggggactaggttttctctattttaaaagatgtcaat

SEQ ID NO: 3083 - DNA, 675 bp, unidentified
  source 1..675: mol_type = unassigned DNA; note = EV D94 sequence
cgtggcggccagtactctggtatcacggtacctttgtacgcctgttttatatccccttcccccgcaacttagaagaaaacaaatcaagttcactaggagggggtacaaaccagtaccaccacgaacaagcacttctgtttccccggtgatgtcgtatagactgtaaccacggttgaaaacgattgatccgttatccgctcttgtacttcgaaaagcccagtatcaccttggaatcttcgatgcgttgcgctcagcactcaaccccagagtgtagcttaggtcgatgagtctggacactcctcaccggcgacggtggtccaggctgcgttggcggcctacctgtggtccaaagccacaggacgctagttgtgaacaaggtgtgaagagcctattgagctacaagagaatcctccggcccctgaatgcggctaatcctaaccacggagcaagggtacacaaaccagtgtatatcttgtcgtaacgcgcaagtctgtggcggaaccgactactttgggtgtccgtgtttccttttgtttttatcatggctgcttatggtgacaatctaagattgttatcatatagctgttggattggccatccggtaatttattgagatttgagcatttgcttgtttcttcaacaatttcacctattcattgcatttcagcagtcaaa

SEQ ID NO: 3084 - DNA, 675 bp, Rabovirus A
  source 1..675: mol_type = genomic DNA
ctacggatatttgcatgacccgctttctatcgccccaacaatcccctttgtaaccacaagctttactcaggctagcagcccgactagctgtttggaagaaaaggctagggcacacaccaacaacaccgaccccactggtcgaaggccgcttggcaataagactggtggaacagggtcgcctgtagttgtttggaacattctttctaatgactttgtcagcggtgctactcacaccgtaactcttctaccctatccccacgcttgtggaactaggaggggatgagtgattcaagtaagtactgtcagaatggtgaaaatgatctgattctgaaacgctatggatccatcgaaagatggggctacacgcctgcggaacaacacatggtaacatgtgccccaggggccgaaagccacggtgataggatcacccgtgtagtttgagatcatatcaatgttcatagtctagtaagatgatttgaaatctaactgagctgatggctaactgcttgtcttattgcggcctaaggatgtcctgcaggtacctttagataaccttaagagactattgatctgagcaggagccaaagtggtctttcccagctttggttaaaaaacgtctaagccgcggcagggggcgggaggccccctttcctcccaaaacttaatattgattgt

SEQ ID NO: 3085 - DNA, 113 bp, Antarctic penguin virus A
  source 1..113: mol_type = genomic DNA
ctaggagactacgcagtgggataagatgactatgatgtcgtacgggcagaagccagtacagtcgaagtcgagaccgacgtcgaggatttgactctgcctgacctagtgccatc

SEQ ID NO: 3086 - DNA, 675 bp, Ljungan virus 87-012
  source 1..675: mol_type = genomic DNA
ctcattgcccacacctggttggttcccaggttcatacaataaccatcaataaacttttaacatctaagatagtattatcccatactagactggacgaagccgcttggaataagtctagtcttatcttgtatgtgtcctgcactgaacttgtttctgtctctggagtgctctacacttcagtaggggctgtacccgggcggtcccactcttcacaggaatctgcacaggtggctttcacctctggacagtgcattccacacccgctccacggtagaagatgatgtgtgtctttgcttgtgaaaagcttgtgaaaatcgtgtgtaggcgtagcggctacttgagtgccagcggattacccctagtggtaacactagcctctgggcccaaaaggcatgtcatttgaccactcaggtacacaaccccagtgatgcacacgcttagtaatggcttagtaacaaacattgattgatcatttgaaagctgttaggaggtttaggtatgacgggctgaaggatgccctgaaggtacccataggtaaccttaagcgactatggatctgatcaggggcccaccatgtaacacatgggtagaagtcttcggaccttgggttaaaaaacgtctaggcccgccccccacagggatgtggggtttcccttataaccccaatattgtata

SEQ ID NO: 3087 - DNA, 568 bp, Encephalomyocarditis virus
  misc_feature 1..568: note = B
  source 1..568: mol_type = genomic DNA
ctccccctccccccccttactatactggccgaagccacttggaataaggccggtgtgcgtttgtctacatgctattttctaccgcattaccgtcttatggtaatgtgagggtccagaacctgaccctgtcttcttgacgaacactcctaggggtctttcccctctcgacaaaggagtgtaaggtctgttgaatgtcgtgaaggaagcagttcctctggaagcttcttaaagacaaacaacgtctgtagcgaccctttgcaggcagcggaaccccccacctggtgacaggtgcctctgcggccaaaagccacgtgtataagatacacctgcaaaggcggcacaaccccagtgccacgttgtgagttggatagttgtggaaagagtcaaatggctctcctcaagcgtattcaacaaggggctgaaggatgcccagaaggtaccccattgtatgggatctgatctggggcctcggtgcacgtgctttacacgtgttgagtcgaggtgaaaaaacgtctaggccccccgaaccacggggacgtggttttcctttgaaaaccacgattacaat

SEQ ID NO: 3088 - DNA, 675 bp, Yak enterovirus
  source 1..675: mol_type = genomic DNA
ctccggcacagccgcaccagtgcactggtacgctagtaccttttcacggggtagtcggtatccccccccgtaacttagaagcatgtaacaaaccgaccaataggtgcgcggcagccagctgcgttgcggtcaagcacttctgtctccccggtccgcaaggatcgttacccgcccactccactacgaggagcctagtaactggccaagtgattgcggagttgcgttcagccacaaccccagtggtagctctggaagatggggctcgcacatcccccgtggtaacacggttgcttgcccgcgtgtgcttccgggttcagtctccgactgttcacttcaacatcacgcaaccagccaagagccgattgtgctggagtggtcttcctccggggccgtgaatgctgctaatcctaacctccgagcgtgtgcgcacaatccagtgttgctacgtcgtaacgcgtaagttggaggcggaacagactactttcggcaccccgtgtttcctttattttattcttattttatggtgacaattgcagagatttgtgatattgcgactttaccgttaaacatagcactgcattacctggttgcattccacaaaacttcagagattcctagttcctacattgacctacttgtttatttgaatcttaaatacaaacttgagcaagtgaa

SEQ ID NO: 3089 - DNA, 645 bp, Caprine Kobuvirus
  misc_feature 1..645: note = d30
  source 1..645: mol_type = genomic DNA
ctcttttccggtggccacgcccgggccaccgatacttcccttcactccttcgggactgttggggaggaacacaacagggctcccctgttttcccattccttcccccttttcccaaccccaaccgccgtatctggtggcggcaagacacacgggtctttccctctaaagcacaattgtgtgtgtgtcccaggtcctcctgcgtacggtgcgggagtgctcccacccaactgttgtaagcctgtccaacgcgtcgtcctggcaagactatgacgtcgcatgttccgctgcggatgccgaccgggtaaccggttccccagtgtgtgtagtgcgatcttccaggtcctcctggttggcgttgtccagaaactgcttcaggtaagtggggtgtgcccaatccctacaaaggttgattctttcaccaccttaggaatgctccggaggtaccccagcaacagctgggatctgaccggaggctaattgtctacgggtggtgtttcctttttcttttcacacaactctactgctgacaactcactgactatccacttgctctcttgtgcctttctgctctggttcaagttccttgattgtttttgactgcttttcactgcttttcttctcacaatccttgctcagttcaaagtc

SEQ ID NO: 3090 - DNA, 654 bp, Seneca valley virus
  source 1..654: mol_type = genomic DNA
ctgggccctcatgcccagtccttcctttccccttccggggggtaaaccggctgtgtttgctagaggcacagaggagcaacatccaacctgcttttgtggggaacggtgcggctccaattcctgcgtcgccaaaggtgttagcgcacccaaacggcgcatctaccaatgctattggtgtggtctgcgagttctagcctactcgtttctcccctatccactcactcacgcacaaaaagtgtgctgtaattacaagatttagccctcgcacgagatgtgcgataaccgcaagattgactcaagcgcggaaagcgctgtaaccacatgctgttagtcccttcatggctgcgagatggctatccacctcggatcactgaactggagctcgaccctccttagtaagggaaccgagaggccttcttgcaacaagctccgacacagagtccacgtgattgctaccaccatgagtacatggttctcccctctcgacccaggacttctttttgaatatccacggctcgatccagagggtggggcatgatccccctagcatagcgagctacagcgggaactgtagctaggccttagcgtgccttggatactgcctgatagggcgacggcctagtcgtgtcggttctataggtagcacatacaaat

SEQ ID NO: 3091 - DNA, 410 bp, Shingleback nidovirus 1
  source 1..410: mol_type = genomic DNA
ctgtgagtaccgacaggctcgaagtctattatgaggcgtcgaaacagaaaacctgtaacaactccggtttcatctatcactgccgtcaagaggcagaagaggacgaccacgtgtcaccagatcacttgtatctgtttcagtcaggaagtcaacttttcgacgaagttcgaccattcatcgacccgctgaaaagcgtagaagtcgatgaagatgagctccaaagagccatcgccgatttcgacaaccaaagtgactgtttccactccttcgagctcgtgaatttcgagctgaaacaacaaatcaacgagaacgagtggtacggttattataattacgacaaccaaaactgcaaagttcagttgccagtcacatgtcgaatcgaggacgtaacctgggatcaggtttacgtg

SEQ ID NO: 3092 - DNA, 291 bp, Camel alphacoronavirus
  source 1..291: mol_type = genomic DNA
cttaagtgtcttatctatctatagatagaaaagtcgctttttagactttgtgtctactcttctcaactaaacgaaatttttgctacggccggcatctctgatgctggagtcgtggcgtaattgaaatttcatttgggttgcaacagtttggaaataagtgctgtgcgtcctagtctaagggttctgtgttctgtcacgggattccattctacaaacgccttactcgaggttctgtctcgtgtttgtgtggaagcaaagttctgtctttgtggaaaccagtaactgttccta

SEQ ID NO: 3093 - DNA, 675 bp, unidentified
  source 1..675: mol_type = unassigned DNA; note = HAV FH1 sequence
cttgatacctcaccgccgtttgcctaggctataggctaaatttccctttccctgtcctttccctatttccttttgttttgtttgtaaatattaattcctgcaggttcagggttctttaatctgtttctctataagaacactcaattttcacgctttctgtctcctttcttccagggctctccccttgccctaggctctggccgttgcgcccggcggggtcaactccatgattagcatggagctgtaggagtctaaattggggacgcagatgtttgggacgtcgccttgcagtgttaacttggctttcatgaacctctttgatcttccacaaggggtaggctacgggtgaaacctcttaggctaatacttctatgaagagatgccttggatagggtaacagcggcggatattggtgagttgttaagacaaaaaccattcaacgccgaaggactggctctcatccagtggatgcattgagggaattgattgtcagggctgtctctaggtttaatctcagacctctctgtgcttagggcaaacactatttggccttaaatgggatcctgtgagagggggtccctccattgacagctggactgttctttggggccttatgtggtgtttgcctctgaggtactcaggggcatttaggtttttcctcattcttaaacaata

SEQ ID NO: 3094 - DNA, 675 bp, unidentified
  source 1..675: mol_type = unassigned DNA; note = Halastavi arva (1x mut) sequence
cttgattctaaccttgccgtatggtgccctaacgggttcatttaatcatgcgatgagggttgctataccgcatccattctaaggcgattcaatgcttcatttaggaattttgttgacgattaaaaggtacccccacaaaaacaaaaccaatcttacttgattttcgttttaactgaccactgcgatcccaaattttcgccttcttatcaaagtatgttgtgttctttgggtgtacaacctgagaacttgtctacaactacatattactcgaggaagaaattcggtttaagccgtgccttctcacgtttagtatatctatctggacacaccttcttcatcttctaatccccatctagtctcctgatcagagacgtcgttattaacaaataaccccccttgttaataagagacaaagtacaatcaagctaagttctcttggagttcctgtaggaacttagccattgtgatagagtcataagtctatgtgcatagacagctctagctcaccatttccttcccaacccatcttttcatcagcttaactctatgaatccgatgcaaaaaccattctaacatcttatggtgctttccaagccaaatgagagctcactcttttgagccgctatttaatggacaataaacgttttatagtgtacatcatattgtaaaaacaaa

SEQ ID NO: 3095 - DNA, 660 bp, Malagasivirus B
  source 1..660: mol_type = genomic DNA
ctttattttcttatgtaactcttctttttaagttttattttgcctacttgtgagcttatgcgggaccactgtcttagacaaccccacatttgtcatgagtaagtacacgcaaccattacgattactttttaaccgtctgaccttttgataacaactgaagttaggcgtgaaacatgcatttataccaaagtagccccgcatttccccactacggtgggggggctaccctactggctttggaactgtagccattatgtgttgcctggctttcaggatctcacaacacaacagttctctcacaatggaatatgggtgagattgcagtgacatgaacaagtatctagtagtacatagactcaagcctagttgcctgcggaacaacatgtggtaacacatgccccagggtccaaaagacaagggttaacagccccttctaggtgtctgtgtgtgaagaatactttagtagtgttgttatgatctcacctgttagtacagaatgagtatggcttggtgaaggatgtcctacaggtacccattatatggatctgagtaggagaccactagtggtggctttaccgccaggtgagtggtttaaaaagcgtctagccaagccaacagcactagggatagtgctttctatattttatattttcagtgtat

SEQ ID NO: 3096 - DNA, 675 bp, Hepatovirus D
  source 1..675: mol_type = genomic DNA
ctttggatgcccatagtgcgggggtataaataccgcactccctttagctgttccgagggtatcggaacctatatgtttgttttctgtctgtctgtcagctttatgtgtgctcgtcccctttagggcactcatttcagcttgctttcattcttttcttccccggttctcaccttaccggaggcactggccgttgcgcccggcggggtcaacctagtgattagcactaggctgtaggtgtctaaagtggtgacattaagacttggtaactgatttcagcactgttaactgatgttggggatgacttgattgatcttctggaaggggtaggctacgggtgaaaccccttatcttaataccactatgtagagatagattcagtaggttaagggcagtggataaggttgagttcattttggacaataaaccttcaacactggtggacccaatctcactgaccagatgctttcttgactgatccttcagaggggtgattcttctgaataggttgccttgacactgatgcctgagacccattgggtcgggccttaaatcatggaactccactggactttcatggcctagcttctgccttagacagactctggggccccacgaccctctgggcccttcggggtactcaggggcatttaggtttttccacaattaaaagagtta

SEQ ID NO: 3097 - DNA, 675 bp, unidentified
  source 1..675: mol_type = unassigned DNA; note = EV C102 sequence
ctttgtacgcctgttttacatcccctcccccacgtaactttagaagcaattcaacaagttcaatagagggggtacaaaccagtatcaccacgaacaagcacttctgtttccccggtgattttacataagctgtgcccacggctgaaagtgaatgatccgttacccgctcgagtacttcgaaaagcctagtatcgctttgggatcttcgacgcgttgcgctcagcactctaccccgagtgtagcttaggctgatgagtctgggcattccccatcggcgacgatggcccaggctgcgttggcggcctacccatggctaacgccatgggacgctagttgtgaacaaggtgtgaagagcctattgagctactcgagagtcctccggcccctgaatgcggctaatcccaaccacggatcaggtgcctccaacccaggaggtggcctgtcgtaacgcgcaagtctgtggcggaaccgactactttgggtgtccgtgtttccttttatcttttaaatggctgcttatggtgacaatcatagattgttatcataaagcgaattggattggccatccggtgaaatacaaacacattatttacttgtttgttggatttactccgctcacacagcttactcctaagataatatttattgtattgctggtaaggagacactattata

SEQ ID NO: 3098 - DNA, 675 bp, Porcine enterovirus 9
  source 1..675: mol_type = genomic DNA
gaaccttagaagtttacacaaacaaagaccaataggagtccaacacccagttggattgcggtcaagcacttctgtttccccggacctagtagtgataggctgtacccacggccgaagatgaacccgtccgttatccggctacctacttcgggaagcctagtaacattctgaagtctctgaggcgtttcgctcagcacgaccccggtgtagatcgggctgatgggtctccgcataccccacgggcgaccgtggcggaggccgcgttggcggcccgcctatggcgaaagccataggacgcctcttagatgacagggtgtgaagagcctactgagctgggtagtagtcctccggcccctgaatgcggctaatcctaaccacggagcgtccaccagcaatccagctggcagggcgtcgtaacgggcaactctgtggcggaaccgactactttgggtgtccgtgtttccttttgatcctattttggctgcttatggtgacaacgataagttgttatcataaagctcttgggttggccacctggaaaaagttatcagtgtttgatattgttcggctctcacgcctaccaataagacaagccctatatttacttgttgcattttactcgtcagaagaaatcacagagtatcatttggatttgttactcacattaaggacaag

SEQ ID NO: 3099 - DNA, 138 bp, Mouse Mosavirus
  source 1..138: mol_type = genomic DNA
gaagttgatcatgaacttggttattggtggaacgcacatgaactcccaacaatgatcttgaagacacagcgtggtaacaattaccatgcccttgtggctgcccaagacattgatggctattgggtgatttatgatgac

SEQ ID NO: 3100 - DNA, 690 bp, unidentified
  source 1..690: mol_type = unassigned DNA; note = Kobuvirus SZAL6 5?76 sequence
gaattaaacgggcaccctacccaagggttacatgggaccatattcctcctcccctgtaactttaagttttgtgcccgtattcttgactccaggcggatgttgtgtcgcccgtcctgtgaacaaacagctagacactttcctcccctccctctgggctgctccggcagtccactccctccccccagcgtaacatgccccgctggagtgatgcacctggaagtcgtggacgtgggttagtaacttcggtgaaaacccactataatgacaactggttgacccccacactcaaaggactcgagtctttctcccttaaggctagcccggccacatgaatttgcagctggcaactagtgagtccaccatgtcccgcaacctcggctgcggagtgctgttccccaagcgtatgccttccttctgtaagagtgcgcctggcaagcacatctgagaagtcgttccgctgcgtcgtgccaacctggcgacaggtgacccagtgtgcgtagacttcttccggattcgtccggctcttctctaggaaacatgcgtgtaaggttcatgtgccaaagccctgcgcgcggtgttcttctactgccctaggaatgtgccgcaggtacccctacttcggtagggatctgagcggtagctaattgtctacgggtagtttcatttccatcttctcttcaggtcgacatc

SEQ ID NO: 3101 - DNA, 150 bp, Bat sapelovirus
  source 1..150: mol_type = genomic DNA
gacaggtgttttggagggcggatgacgatatctggctggccaccagggaataacggcaaatgtctgatcatacggttcacaagtctaccggcgatagtggttcaacaccatgtgtagcagggattcttgcgtatgtgaaggcgacagtgc

SEQ ID NO: 3102 - DNA, 675 bp, unidentified
  source 1..675: mol_type = unassigned DNA; note = Kobuvirus sheep TB3 sequence
gaccttctggtacttcttcgcctgggtcacaaaagcgaagaacctgcctctctaacgccagacgagcggcattaaacttgaacttctggcactctccactctcccttttccctgtccctttccccactgcgctctcaaggtcgcgcaatcctgggactagcccagttttaaaagttcctggcaccctttgcccctctaggcccttaaggtaggaactgaccttgtgctgtgatctcggtgcgggagtgctaccacgtagtcatcgtaagcctcgtttctggttctgccctggcaaggctacagagtaccgtgttccgctgtggatgccatccgggtaaccggacccccagtgtgtgtagcggtatgttcacggtccgccgtgttcaccagattcctgacctggctttgctagaaatggtgtgtgcccaatccctgtgaccagtatcaattacatcacctaggaatgctaggaaggtaccccagtcctgagctgggatctgatcctaggctaattgtctacggtgatgctccttttattttcttacaactgctattgactgtctgattgctgattctgctcttgtgctcttctgctctggctcattctcaagggttctctttgtccaagatcctttggttctctccttgttccacttgccactgccaacgcttgtc

SEQ ID NO: 3103 - DNA, 459 bp, GB virus C
  misc_feature 1..459: note = K1737
  source 1..459: mol_type = genomic DNA
gacgtgggggggttgatcccccccctttggcactgggtgcaagccccagaaaccgacgcctatttaaacagacgttaagaaccggcgccgacccggcgaccggccaaaaggtggtggatgggtgatgccagggttggtaggtcgtaaatcccggtcatcttggtagccactataggtgggtcttaagggttggttaaggtccctctggcgcttgtggcgagaaagcgcacggtccacaggtgttggccctaccggtgtgaataagggcccgacgtcaggctcgtcgttaaaccgagcccactacccacctgggcaaacaacgcccacgtacggtccacgtcgcccttcaatgtctctcttgaccaataggcttagccggcgagttgacaaggaccagtgggggctgggcggtaggggaaggacccctgccgctgcccttcccggtggagtgggaaatgc

SEQ ID NO: 3104 - DNA, 341 bp, Hubei sobemo-like virus 3
  source 1..341: mol_type = genomic DNA
gagatgtttgcgtgggccgttgcgctgcgggcggcccacctccctacggggaccgtgagacaccgctggggaaggcccccacccccggccaaggggatcctgccgagaggcaggagaaagaggcccagccctctggggcgcctttaggggtgcctgggagggaagtacccgagccgggcggccggtcgggtgcggctgtgcagttcgaggctaaccgtaaggaaggcctgagctgcctcggcttgtcggaaaggaagacgaaggcacttatcaaggctttcaggaagcaggagcgcaattacagcgcgcgccgtgcggcctggattaaccgcatttggccg

SEQ ID NO: 3105 - DNA, 579 bp, unidentified
  source 1..579: mol_type = unassigned DNA; note = RhPV sequence
gataaaagaacctataatcccttcgcacaccgcgtcacaccgcgctatatgctgctcattaggaattacggctccttttttgtggatacaatctcttgtatacgatatacttattgttaatttcattgacctttacgcaatcctgcgtaaatgctggtatagggtgtacttcggatttccgagcctatattggttttgaaaggacctttaagtccctactatactacattgtactagcgtaggccacgtaggcccgtaagatattataactattttattatattttattcaccccccacattaatcccagttaaagctttataactataagtaagccgtgccgaaacgttaatcggtcgctagttgcgtaacaactgttagtttaattttccaaaatttatttttcacaatttttagttaagattttagcttgccttaagcagtctttatatcttctgtatattattttaaagtttataggagcaaagttcgctttactcgcaatagctattttatttattttaggaatattatcacctcgtaattatttaattataacattagctttatctatttata

SEQ ID NO: 3106 - DNA, 212 bp, Betacoronavirus HKU24
  source 1..212: mol_type = genomic DNA
gataaagtgtgaatcgcttccgtagcatcgcaccctcgatctcttgttagatctaatctaatctaaactttataaaaacactaggtccctgctagcctatgcctgagggtttaggcgttgcatactagtgtcttaggaatttgactgataacacttccctgctaacggcgtgttgcactctcagtctaagcctcccacccataggaggtatc

SEQ ID NO: 3107 - DNA, 675 bp, unidentified
  source 1..675: mol_type = unassigned DNA; note = Parabovirus C sequence
gatgtatccccatcccccagtgtgtatgccatactgcatagctcgcctatgccctatggattcacaaccctttcatataccctccctacccaaccccgtaaccacatgctttactccgcttggggttttgcggccccatgttgtgacgaaatggctacgcaatcaatgcggctaatggggcctgccgcttttaagtggccccagttagaagtttatgcacacccgcccattaggaggccaccagccaggtggtcagagggcaagcacttctgtttccccggtgaagtttgataagctgtgcccacggctgaagcagacagatccgttacccgcctcactactacgagacggctagtagtgtgtaatatccgaatttcattgatccgggtgttccccccacccagaaacgtgtgatgaggagcggcacccctcctatggcaacatagggcctctcctgcgctggcacacgggctctatgagcatgaaatcaggagaaagtcacacgaagaccttattgtgctagtgttgattcctccgcccccctgaatgcggctaatcccaactccggagcgcccgctggcaaacccgccagaagagcgtcgtaatgcgtaagtctggagcggaaccgactactttgggtgtggcgtgtttcctttatttcctttgtatttgtat

SEQ ID NO: 3108 - DNA, 675 bp, Harrier picornavirus 1
  source 1..675: mol_type = genomic DNA
gatgtgtgacggtgtaattactttccggatcccactttcctattataactctttcatcccaaggttagggaaagaacctggctcggtaccaccagaccctccgccacgctagtggactctccggagataacggtaccccctttgtagtcacctgtgctggtgaagaaccacctagtattgcttgggtgcgtgccgcctagcttccatttcttctggagcactgtgcaatgaggtttccccacttggtaacaagtgcctcaggtcccgcaaggatactgtggggtggtgtgaccgcagggagctgtctccacggctcctctaatgttacgccgctatccacaggccagtgcgtgtcatcgatcccggatgacagagctagtattgcgaacccccaagtaagaaaagtggctagtaacctgatagctggtgaagagggtgggtcagttgagtagatgccctagaggtacccgaaaggatctgactagggacccgtgactatacattaggtaaaccgggtataaaaaccatgaaaaactgaccacttttcttttaacctcttctttctttttatgtgtgttaagtgttttgagtttggactgtaccttgcccgcctttcttggattttctctatcgctcttcttacacctactgttatcaaggcactctttagagata

SEQ ID NO: 3109 - DNA, 623 bp, Cripavirus sp.
  source 1..623: mol_type = genomic DNA
gcaaaatcggtagtacgttaaacgtacgaccaccgatgagactgaaatgacactagttgagattatttcaatatcctagtgttataaagtcaatatttgttggttgatcgtttcgtcaatcgatggcgctgacagccggaaagacggcaataataaaaaccaagatttagtttttaagttttgattgaattgcaaaagctatcttgaatagacaatcaaaatattaagtaaagcaaaagcttcttaaagaagacaatatttaattagttagtaaccaaacctcatcgtgcccctaagggttaaccggttacgtaaaagcgtagaggtattaaggtcactgcggagacctaaaatccgcaattttatgttttgtaatgttttagttatagacttagatgtaactataagagtttataaatacttgtttcaagatttatagacaagatctgatcctatggattttagataaccttcatgttagtggatagtgtgtgtacctatctaaacgcataaggctcttatttcatatttaaagtaggactatgtattacggcgcatctaacggtaacgttagtcaagaccggagaatctcggaatgaattttagtaattcccaaatttata

SEQ ID NO: 3110 - DNA, 570 bp, Plautia stali intestine virus
  misc_feature 1..570: note = (2x mut for Xba1)
  source 1..570: mol_type = genomic DNA
gcaaaatgggtacgtagttaaccactgcgtatcaggattgcaggccacgaagggtatttgcatatctttctatgcggtattacggcttaaaacccgttgtatcttgttgtttgactgcctgtatcactagtggccattttatttaggttagagacccctgatagtaggagagttacaaactctttaaaaattgttgaccccggaaaagatggtgacccctgtaagtagttgatcaagaagatctatgcgctggcatagtaatccagtgtttcctgttttaggatgacctctgaaagtagatgaccgtggaaagtcacgtagtgccccaataagcacgtttgggcagcgtgcgctatcacaaggcttgatctccgaggagccccttgttttagctggctggaagccaatgatcttaagtagataagtgctgttgcttgtagttcaacagaaagctttgagtacgtctttcttgcgagaaagaacacatgcattcttatgctctcaattctattatttttattttgggcgaaaggaaagctctcacgcgagtacgaatagccaaccctttat

SEQ ID NO: 3111 - DNA, 675 bp, Hepatovirus G
  source 1..675: mol_type = genomic DNA
gcaaggggtggttttaaccttgcacgcgtttaccgtgcgttaacggttttccatgtttgtatgtcttgtttgtattatgtgttttgtaaatattaattcctgcaggttcagggttctttaatcatgttgggctgtacccacactcaacttttggccataagtgagtttcttaacgaaccttttaacacaggatgttattagggcccaatattttccctgaggccttctttggcctctattttttccccttttctatctccttgtattccgggctcacgtgatgccaatggactgacccatgcgcccgtgggggttaactactggagtagccagtagctgtaggtgctaaaagtcacgtacgtgtaagactggacgagacctctcagctataactgaaagtagtaagtatgtctgaacttcttgaaggggtaggctacgggtgaaaccccttaggttaatactcatattgagagatacctctgataggtgaaggtttccggtagaggtgagtttaacgacaaagcctctcaacggatgtgggcccacctcatcagcaagatgctttcatacccaataccgtaggggctgggttgttgagttcagtcccaagcgtccctcccgcaaggttgtaggggtactcaggggcatttaggtttccacaattaaacaaataca

SEQ ID NO: 3112 - DNA, 675 bp, unidentified
  source 1..675: mol_type = unassigned DNA; note = EV F1 BEV 261 sequence
gcaatgctgcaccagtgcactggtacgctagtaccttttcacggagtagatggtatcccttaccccggaacctagaagattgcacacaaaccgaccaataggcgcaccgcatccagccgtgcagcggtcaagcacttctgtctccccggtctgtaaagatcgttatccgcccgacccactacgaaaagcctagtaactggccaagtgaacgcgaagttgcgctccgccacaaccccagtggtagctctggaagatggggctcgcaccacccccgtggtaacacggttgcctgcccgcgtgtgcttccgggttcggtctcgtgccgttcacttcaacttcacgcaaccagccaagagcctattgtgctgggacggttttcctccggggccgtgaatgctgctaatcccaacctccgagcgtgtgcgcacaatccagtgttgctacgtcgtaacgcgtaagttggaggcggaacagactactttcggtaccccgtgtttcctctcattttatttaatattttatggtgacaattgttgagatttgcgctcttgcaacgttgccattgaatattggcttatactatttggttgccttttacaaaacctctgatatacccagttcttacattgatctgcttgtttttctcaatttgaagtatagactacaaatagcaaa

SEQ ID NO: 3113 - DNA, 123 bp, Porcine pestivirus 1
  source 1..123: mol_type = genomic DNA
gcagatatcggtggtggacctgggggttgggctcaccgtgccccttcatggggtagacctcactgcttgatagagtgccggcggatgcctcaggtaagagtataaaatccgttgttcactaac

SEQ ID NO: 3114 - DNA, 472 bp, Botrytis cinerea mitovirus 4
  misc_feature 1..472: note = RdRp
  source 1..472: mol_type = genomic DNA
gccccgccgaccttcctatttatttctaaataggaaggtcccgactagtcggataattcggtttaacgaattatggttagatctattaaagttaaaatagattgaatttctttctcatcctccttattcctatactttgggagtaaatgacaaatgtctatcctcaaaccgaaatggcttaagtgatgaatttgaaagaaaggtaggttttaagaatataaggcatcaatatattatacccttgaatgttaagtgaccacggcgtgacgattagggctatcttaggatagacagccatctaacgcgacagcagtggaaatcagcttagcatctcaagatcatgtataatatatacataaccttacaattataaaaccaaaccaaaacacactataattttatataaattatagaagtatcggacctggacggtacctactattaactgatagtagccaaatgcaggaagctc

SEQ ID NO: 3115 - DNA, 415 bp, Grapevine associated narnavirus-1
  source 1..415: mol_type = genomic DNA
gcccggggggtgcagtcctgtgaaagggtctgcaccatactatatatgtatatgattacatcccaaaaggcgacttcgttcaggttttaaatctgacgtaggtccagtaaataagcatgtcaaaacatgtaagtttatcctgtaatctactctcataagatgagataagatgatattgcagttcccatgtaaataaatccattatgaattcattcatataaggtagaagtggtaactatggttgaaacattaatataaaacggtcattttgcatgaacgtcattaaggaactggcataccaatgtctatttagtgactatgatatttagagtatcccttatattaattaacaattattccttttagcatatcatccgacaacaaattttaaaagaagaaatattactcattaaaa

SEQ ID NO: 3116 - DNA, 675 bp, Parechovirus A
  source 1..675: mol_type = genomic DNA
gccgtcgggccttacaccccgacttgctgagtttctctaggagagtccctttcccagccagaggtggctggtcaaacaataccaaacgtaactaaacatctaagataacatagccctatgcctggtctccaccagttgaaggcatcttgcaataaaatgggtggattaagacgcttaaagcatggagtcaattatcttttctaactagtgatcttcactgggtggcagatggcgtgccataactctattagtgggataccacgctcgtggatcttatgcccacacagccatcctctagtaagtttgcaaggtgtctgatgaggcgtgggaacttattggaaataattacttgctgcgaagcatcctactgccagcggatcaacacctggtaacaggtgcccctggggccaaaagccacggtttaacagaccctttaggattggttaaaacctgagtaattatggaagatacttagtacctaccaacttggtaacagtgcaaacactagttgtaaggcccacgaaggatgcccagaaggtacccgcaggtaacaagagacactgtggatctgatctggggccacctacctctatcctggtgaggtggttaaaaaacgtctagtgggccaaacccaggggggatccctggtttccttattttagtgtaaatgtcatt

SEQ ID NO: 3117 - DNA, 224 bp, Equine arteritis virus
  source 1..224: mol_type = genomic DNA
gctcgaagtgtgtatggtgccatatacggctcaccaccatatacactgcaagaattactattcttgtgggcccctctcggtaaatcctagagggctttcctctcgttattgcgagattcgtcgttagataacggcaagttccctttcttactatcctattttcatcttgtggcttgacgggtcactgccatcgtcgtcgatctctatcaactacccttgcgact

SEQ ID NO: 3118 - DNA, 743 bp, unidentified
  source 1..743: mol_type = unassigned DNA; note = CVA10 sequence
gctcttccgatctgggttgttcccacccacagggcccactgggcgccagcactctgattccacggaatctttgtgcgcctgttttacaacccttcccaatttgtaacgtagaagcaatacacactactgatcaatagtaggcatggcgcgccagtcatgtcatgatcaagcacttctgttcccccggactgagtatcaatagactgctcacgcggttgaaggagaaaacgttcgttacccggctaactacttcgagaaacctagtagcaccatggaagctgcggagtgtttcgctcagcactttccccgtgtagatcaggtcgatgagtcactgcaatccccacgggcgaccgtggcagtggctgcgttggcggcctgcctatggggcaacccataggacgctctaatgtggacatggtgcgaagagtctattgagctagttagtagtcctccggcccctgaatgcggctaatcctaactgcggagcacatgccttcaacccaggaggtggtgtgtcgtaacgggtaactctgcagcggaaccgactactttgggtgtccgtgtttccttttatccttatattggctgcttatggtgacaatcacggaattgttgccatatagctattggattggccatccggtgtctaacagagctattgtatacctatttgttggatttactcccctatcatacaaatctctgaacactttgtgctttatactgaacttaaacacacgaaa

SEQ ID NO: 3119 - DNA, 145 bp, unidentified
  source 1..145: mol_type = unassigned DNA; note = PSIV IGR sequence
gctgactatgtgatcttattaaaattaggttaaatttcgaggttaaaaatagttttaatattgctatagtcttagaggtcttgtatatttatacttaccacacaagatggaccggagcagccctccaatatctagtgtaccctcg

SEQ ID NO: 3120 - DNA, 664 bp, unidentified; identical to SEQ ID NO: 1316
  source 1..664: mol_type = unassigned DNA; note = Aichivirus DVI2321 sequence

SEQ ID NO: 3121 - DNA, 675 bp, Megrivirus E
  source 1..675: mol_type = genomic DNA
gcttggcaacctcatatcgttactctgccgaccagtctgggtcgtgtggccacacaatgggattcgttctgttgtgtagagtcacatggcattactgggctgatcggtggggatccgttgccacccctaaacccttacatttactggactgcttttcttggccccggaatgattcgctcacccgcgatgaggactgttgttcttattatggcaggattacgcgtctggtccgcgtaaggactaattcctatgtttatacgttactaccttgttctgaacggtgggcgccaccccgcctagtaggatcctggcttatcgtgtagacctctagggaccacattagctagagtgtaggctgctatggatggagtagtgacccctttttgggtatcactctctaagactccggaatgtgtcatagtacgctggaaatccttacttgtttttccatgagggggaggtggtgctgaaatattgcaagccacccctcggttaaaacagtttggtgccgcttatgccatattaccgccccttgtagttgggctgtttttgcagctccgggttagtagagtaccatagtggacgcggtgttgggaatcaccgccttggctgcacactgcttgatagagctgcggctggtcaagctaattgtggtataaccagttgatttggcat

SEQ ID NO: 3122 - DNA, 631 bp, Avian orthoreovirus
  misc_feature 1..631: note = segment S1
  source 1..631: mol_type = genomic DNA
gctttttcaatcccttgtgtcgatgttcccgtatgtcatctggttcatgtaacggtgcaacttctatttttggtaacgttcactgtcaggcagcgcaaaactcggcgggtggtgatcttcaagcgacttcctctcttgttgcttattggccctacttggctgcgggcggtggtctgctcgttgttattattataattgttggcgctgtttgttgttgcaaggctaaggttaaagcggacgcagcccgaaacgttttctaccgagagctgttcgcacttaattcgggtaaaagtgatgcaggacctccgatttaccaggtttagtgtacgacgatttgagttttcacctttcgtcttagaggagtgcactactccatctttcacgactataactaataccgatccggctctctactttaacattgagtttccgtcaagtcatcgtctctcccccttcattccagaactgttgtctcagccttgtaccgttcacgtttcattgattcggagattcgctctctgtgcaaccttatctagtatttgtgaatacgactgtgcgctactgccatccatcaacgctattacgacgatccctacaccaggtgcgtcatcatctctgattgttcattggg

SEQ ID NO: 3123 - DNA, 315 bp, Botrytis cinerea mitovirus 2
  misc_feature 1..315: note = RdRp
  source 1..315: mol_type = genomic DNA
ggaacttttcagttccagaagtggctttattaagccttcaaagtttacactttgaacctgcgattaattccccatagtgactcttgttactgtgaattaggaatagttgtagttcaacttctaatgaggtgaacaatataataactcatcttattaaccctatacgtagacaattgtccaaagagacagttggaattctgccaatctggaatgtttggtacgcgtagaagataataagagaccctctattcccctgcctcatgactaagtcatggcccggggtgtaatagagatacttttatatattatacaatc

SEQ ID NO: 3124 - DNA, 458 bp, Basella alba endornavirus
  source 1..458: mol_type = genomic DNA
ggaatatggctaatcggcttattctaatcaaacgcaaaagacttatgacacagaccggacctgaacgaggtgataaaacacctcgttcaggttcaaaacgtagaagattcattcctccgattagaaatacaactacgtctaagcacgatagagatggtatcaagatcggttttagaccacgagaaaatcggcaaatgaaagtacaagttgggtggtttaaattaccaagaacagtaacattcaagaacaacggcaacccgtttgttacctcatttcgtaaattgtttagaagtaacaaagataaattatttaatggtgggaagaacctaagtacagtaccagccagaagtagtgaaatgacagaaatgtttatgttcatgtccacgctagagggccaattgtcaatccaagatcgagatccaaaaataatcaataagtctatatacatgatagaggta

SEQ ID NO: 3125 - DNA, 600 bp, Hubei tombus-like virus 9; identical to SEQ ID NO: 196
  source 1..600: mol_type = genomic DNA

SEQ ID NO: 3126 - DNA, 675 bp, San Angelo virus
  misc_feature 1..675: note = P-113
  source 1..675: mol_type = genomic DNA
ggagatctaagtcaaccgactccgacgaaactaccatcatgcctccccgattatgtgatgctttctgccctgctgggtggagcatcctcgggttgagaaaaccttcttcctttttccttggaccccggtcccccggtctaagccgcttggaataagacagggttatcttcacctcttccttcttctacttcatagtgttctatactatgaaagggtatgtgtcgccccttccttctttggagaacacgcgcggcggtctttccgtctctcgaaaagcgcgtgtgcgacatgcagagaaccgtgaagaaagcagtttgcggactagctttagtgcccacaagaaaacagctgtagcgaccacacaaaggcagcggaccccccctcctggcaacaggagcctctgcggccaaaagccacgtggataagatccacctttgtgtgcggcacaaccccagtgccctggtttcttggtgacacttcagtgaaaacgcaaatggcgatctgaagcgcctctgtaggaaagccaagaatgtccaggaggtaccccttccctcgggaagggatctgacctggagacacatcacatgtgctttacacctgtgcttgtgtttaaaaattgtcacagctttcccaaaccaagtggtcttggttttcactctttaaactgatttcact

SEQ ID NO: 3127 - DNA, 675 bp, Cosavirus B1; identical to SEQ ID NO: 3081
  source 1..675: mol_type = genomic DNA

SEQ ID NO: 3128 - DNA, 675 bp, Cosavirus D1; identical to SEQ ID NO: 3082
  source 1..675: mol_type = genomic DNA

SEQ ID NO: 3129 - DNA, 675 bp, unidentified; identical to SEQ ID NO: 3083
  source 1..675: mol_type = unassigned DNA; note = EV D94 sequence

SEQ ID NO: 3130 - DNA, 675 bp, Rabovirus A; identical to SEQ ID NO: 3084
  source 1..675: mol_type = genomic DNA

SEQ ID NO: 3131 - DNA, 113 bp, Antarctic penguin virus A; identical to SEQ ID NO: 3085
  source 1..113: mol_type = genomic DNA

SEQ ID NO: 3132 - DNA, 675 bp, Ljungan Virus 87-012; identical to SEQ ID NO: 3086
  source 1..675: mol_type = genomic DNA

SEQ ID NO: 3133 - DNA, 568 bp, Encephalomyocarditis virus; identical to SEQ ID NO: 3087
  misc_feature 1..568: note = B
  source 1..568: mol_type = genomic DNA

SEQ ID NO: 3134 - DNA, 675 bp, Yak enterovirus; identical to SEQ ID NO: 3088
  source 1..675: mol_type = genomic DNA

SEQ ID NO: 3135 - DNA, 645 bp, Caprine kobuvirus; identical to SEQ ID NO: 3089
  misc_feature 1..645: note = d30
  source 1..645: mol_type = genomic DNA

SEQ ID NO: 3136 - DNA, 654 bp, Seneca valley virus; identical to SEQ ID NO: 3090
  source 1..654: mol_type = genomic DNA

SEQ ID NO: 3137 - DNA, 410 bp, Shingleback nidovirus 1; identical to SEQ ID NO: 3091
  source 1..410: mol_type = genomic DNA

SEQ ID NO: 3138 - DNA, 291 bp, Camel alphacoronavirus; identical to SEQ ID NO: 3092
  source 1..291: mol_type = genomic DNA

SEQ ID NO: 3139 - DNA, 675 bp, unidentified; identical to SEQ ID NO: 3093
  source 1..675: mol_type = unassigned DNA; note = HAV FH1 sequence

SEQ ID NO: 3140 - DNA, 675 bp, Halastavi arva; identical to SEQ ID NO: 3094
  misc_feature 1..675: note = (1x mut)
  source 1..675: mol_type = genomic DNA

SEQ ID NO: 3141 - DNA, 660 bp, Malagasivirus B; identical to SEQ ID NO: 3095
  source 1..660: mol_type = genomic DNA

SEQ ID NO: 3142 - DNA, 675 bp, Hepatovirus D; identical to SEQ ID NO: 3096
  source 1..675: mol_type = genomic DNA

SEQ ID NO: 3143 - DNA, 675 bp, unidentified; identical to SEQ ID NO: 3097
  source 1..675: mol_type = unassigned DNA; note = EV C102 sequence

SEQ ID NO: 3144 - DNA, 675 bp, Porcine enterovirus 9; identical to SEQ ID NO: 3098
  source 1..675: mol_type = genomic DNA

SEQ ID NO: 3145 - DNA, 138 bp, Mouse Mosavirus; identical to SEQ ID NO: 3099
  source 1..138: mol_type = genomic DNA

SEQ ID NO: 3146 - DNA, 690 bp, Kobuvirus sp.; identical to SEQ ID NO: 3100
  misc_feature 1..690: note = SZAL6 5?76
  source 1..690: mol_type = genomic DNA

SEQ ID NO: 3147 - DNA, 150 bp, Bat sapelovirus; identical to SEQ ID NO: 3101
  source 1..150: mol_type = genomic DNA

SEQ ID NO: 3148 - DNA, 675 bp, Kobuvirus sp.; identical to SEQ ID NO: 3102
  misc_feature 1..675: note = sheep TB3
  source 1..675: mol_type = genomic DNA

SEQ ID NO: 3149 - DNA, 459 bp, GB virus C; identical to SEQ ID NO: 3103
  misc_feature 1..459: note = K1737
  source 1..459: mol_type = genomic DNA

SEQ ID NO: 3150 - DNA, 341 bp, Hubei sobemo-like virus 3; identical to SEQ ID NO: 3104
  source 1..341: mol_type = genomic DNA

SEQ ID NO: 3151 - DNA, 579 bp, unidentified; identical to SEQ ID NO: 3105
  source 1..579: mol_type = unassigned DNA; note = RhPV sequence

SEQ ID NO: 3152 - DNA, 212 bp, Betacoronavirus HKU24; identical to SEQ ID NO: 3106
  source 1..212: mol_type = genomic DNA

SEQ ID NO: 3153 - DNA, 675 bp, Parabovirus C; identical to SEQ ID NO: 3107
  source 1..675: mol_type = genomic DNA

SEQ ID NO: 3154 - DNA, 675 bp, Harrier picornavirus 1; identical to SEQ ID NO: 3108
  source 1..675: mol_type = genomic DNA

SEQ ID NO: 3155 - DNA, 623 bp, Cripavirus sp.; identical to SEQ ID NO: 3109
  source 1..623: mol_type = genomic DNA

SEQ ID NO: 3156 - DNA, 570 bp, Plautia stali intestine virus; identical to SEQ ID NO: 3110
  misc_feature 1..570: note = (2x mut for Xba1)
  source 1..570: mol_type = genomic DNA

SEQ ID NO: 3157 - DNA, 675 bp, Hepatovirus G; identical to SEQ ID NO: 3111
  source 1..675: mol_type = genomic DNA

SEQ ID NO: 3158 - DNA, 675 bp, unidentified; identical to SEQ ID NO: 3112
  source 1..675: mol_type = unassigned DNA; note = EV F1 BEV 261 sequence

SEQ ID NO: 3159 - DNA, 123 bp, Porcine pestivirus 1; identical to SEQ ID NO: 3113
  source 1..123: mol_type = genomic DNA

SEQ ID NO: 3160 - DNA, 472 bp, Botrytis cinerea mitovirus 4; identical to SEQ ID NO: 3114
  misc_feature 1..472: note = RdRp
  source 1..472: mol_type = genomic DNA

SEQ ID NO: 3161 - DNA, 415 bp, Grapevine associated narnavirus-1; identical to SEQ ID NO: 3115
  source 1..415: mol_type = genomic DNA

SEQ ID NO: 3162 - DNA, 675 bp, Parechovirus A2; identical to SEQ ID NO: 3116
  source 1..675: mol_type = genomic DNA

SEQ ID NO: 3163 - DNA, 224 bp, Equine arteritis virus; identical to SEQ ID NO: 3117
  source 1..224: mol_type = genomic DNA

SEQ ID NO: 3164 - DNA, 743 bp, unidentified; identical to SEQ ID NO: 3118
  source 1..743: mol_type = unassigned DNA; note = CVA10 sequence

SEQ ID NO: 3165 - DNA, 145 bp, Plautia stali intestine virus; identical to SEQ ID NO: 3119
  misc_feature 1..145: note = IGR
  source 1..145: mol_type = genomic DNA

SEQ ID NO: 3166 - DNA, 664 bp, unidentified; identical to SEQ ID NO: 1316
  source 1..664: mol_type = unassigned DNA; note = Aichivirus DVI2321 sequence

SEQ ID NO: 3167 - DNA, 675 bp, Megrivirus E; identical to SEQ ID NO: 3121
  source 1..675: mol_type = genomic DNA

SEQ ID NO: 3168 - DNA, 631 bp, Avian orthoreovirus; identical to SEQ ID NO: 3122
  misc_feature 1..631: note = segment S1
  source 1..631: mol_type = genomic DNA

SEQ ID NO: 3169 - DNA, 315 bp, Botrytis cinerea mitovirus 2; identical to SEQ ID NO: 3123
  misc_feature 1..315: note = RdRp
  source 1..315: mol_type = genomic DNA

SEQ ID NO: 3170 - DNA, 458 bp, Basella alba endornavirus; identical to SEQ ID NO: 3124
  source 1..458: mol_type = genomic DNA

SEQ ID NO: 3171 - DNA, 600 bp, Hubei tombus-like virus 9; identical to SEQ ID NO: 196
  source 1..600: mol_type = genomic DNA

SEQ ID NO: 3172 - DNA, 675 bp, San Angelo virus; identical to SEQ ID NO: 3126
  misc_feature 1..675: note = P-113
  source 1..675: mol_type = genomic DNA

SEQ ID NO: 3173 - DNA, 675 bp, Hepatovirus I
  source 1..675: mol_type = genomic DNA
ggctgcctgtgtctcaggggtaagtactggggccgcgttgaccgtgcggtacggttatgcttttagattaggatgtccgtctgtccggcactctcttttgcttaaaatggccttaaatccatgggaggcgtaaccatgggccctttgttacctagacatgattgcattgggggccgtccttggggcttaggccccagccatttctcttgactcgtctaagagtttacttcatccttttctttactttattttccaggctctcagcatgccgacggctctgaccactgcgcccggtggggttaactgcatgattagcatgcagctgtaggagttaaaagtgctgacaggccaattctgacgtaagtccactctatattaacttgatcaagtaaggttgattgatctttgtgagagggtaggctacgggtgaaaccctctaggttaatactcatattgagagatacctccagaaggtgaaggttggcggatattggtgagttcttttaggacaaaaacctttcaacgcctgtgggcccacctcactggcacaatgctttcatccccaattgtgatgggtagtttggactgaaatcaggagtaacctgccctacgagtttaggggtagttcaggggtatttaggcttccacatttgatagagtttatgagagtgagcc

SEQ ID NO: 3174 - DNA, 280 bp, Hepacivirus K
  source 1..280: mol_type = genomic DNA
gggaacaatggtccgtccgcggaacgactctagccatgagtctagtacgagtgcgtgccacccattagcacaaaaaccactgactgagccacacccctcccggaatcctgagtacaggacattcgctcggacgacgcatgagcctccatgccgagaaaattgggtatacccacgggtaaggggtggccacccagcgggaatctgggggctggtcactgactatggtacagcctgatagggtgctgccgcagcgtcagtggtatgcggctgttcatggaac

SEQ ID NO: 3175 - DNA, 280 bp, Hepacivirus K; identical to SEQ ID NO: 3174
  source 1..280: mol_type = genomic DNA

SEQ ID NO: 3176 - DNA, 638 bp, Phopivirus; identical to SEQ ID NO: 764
  misc_feature 1..638: note = strain NewEngland
  source 1..638: mol_type = genomic DNA

SEQ ID NO: 3177 - DNA, 675 bp, Parechovirus A8
  source 1..675: mol_type = genomic DNA
gggccttataccccgacttgctgagtttctctaggagagtccctttcccagccctgaggcggctggataataaaggcctcacatgtaacaaacatctaagacaaaataatttgccttgcacctggtccccactagttgaaggcatctagcaataagatgagtggaacaaggacgcttaaagtgcaatgatagttatcttttctaacccactatttatagtggggtggtggatggcgcaccataattctaatagtgagataccacgcttgtggaccttatgctcacacagccatcctctagtaagtttgtgagacgtctggtgacgtgtgggaacttactggaaacaatgctttgccgtaaggctttcattagccagcggaccaccacctggtaacaggtgcctctggggccaaaagccaaggtttaatagaccctaatggaatggttcaaacctggagcattgtggaaagtacttagtacctgctgatctggtagtaatgcaaacactagttgtacggcccacgaaggatgcccagaaggtacccgtaggtaacaagtgacactatggatctgatctggggccaactacctctatcttggtgagttggttaaaaaacgtctagtgggccaaacccaggggggatccctggtttccttttattttactttgtcaat

SEQ ID NO: 3178 - DNA, 675 bp, Rabbit Kobuvirus
  source 1..675: mol_type = genomic DNA
gggctataaatatgggcattcctcttcccccttccccttttgaagatgagtgcgcatattcttgactccgcctggattggccgcccaaggcgtgaacaagcagctaggccaccatgacactgcggtggtgtccgaacccgcgggtgccttcacgggcacctgtggtatgtaggactcccaccgtggtcttccctttccccctcaatctttccccctggttcgactaacgggaccagtgctggaacctgtccggtgaacggtatagcaggcccccccggcagaaacacccggtgcttaccccttaaggctagcccccttccatgaatttggttggggcaactagtgggtgtacagttggcgtgaaccctccggtctaggagtgctcttgcccaatcctctgtgtgtgccttgcagtagggactggcaatccttcgcgtaggtgatccgctgtgccatgccatcctggcgacaggaggcccagtgtgcgcaacctacgtcccttctgggtgctgcattgcattacctttggagtaagcttggtgtgccgaaaccccagggtttacgtaccactcgtggtgtgaggaatgtgccgcaggtaccccatccttgaggtgggatctgagcggtagctaattgtctagcaccactttcttccttttttctttgctggtcacg

SEQ ID NO: 3179 - DNA, 520 bp, Simian pegivirus
  source 1..520: mol_type = genomic DNA
ggggaatctcaccccccgtccggttccggaagaatcggaaaccgacaccctgaccaatcattcttgatcatagagtggatgttagtgaaagccagacgaaagccggcggatgggtggtgacagggttggtaggtcgtaaatcccggccaccctggtacccggtataagttgggcggaagctgactgaagctccgtgctcttttctgtgcgttcttggtgcacggtccacaggtgacgcctataccggtgtgaataataggccgactcgagcggagtcgttaaactgagaacctccatacggatggcaacttggcttgcgtacggggacgccgctaaagtcacagtgggttaagtccggcgggttgacaaccccagcaaggcgagggggtcctattgttggactctgccagttcccggtggaggtaggcatggggtggcccagctccgcggcgcgctacagccggggtagcccaaaatccgaaaggtgagggcgggccacatgtccgaaatttagtcaagc

SEQ ID NO: 3180 - DNA, 665 bp, Caprine kobuvirus
  misc_feature 1..665: note = d10
  source 1..665: mol_type = genomic DNA
ggggcctcggccccctcaccctcttttccggtggccacgcccgggccaccgatacttcccttcactccttcgggactgttggggaggaacacaacagggctcccctgttttcccattccttcccccttttcccaaccccaaccgccgtatctggtggcggcaagacacacgggtctttccctctaaagcacaattgtgtgtgtgtcccaggtcctcctgcgtacggtgcgggagtgctcccacccaactgttgtaagcctgtccaacgcgtcgtcctggcaagactatgacgtcgcatgttccgctgcggatgccgaccgggtaaccggttccccagtgtgtgtagtgcgatcttccaggtcctcctggttggcgttgtccagaaactgcttcaggtaagtggggtgtgcccaatccctacaaaggttgattctttcaccaccttaggaatgctccggaggtaccccagcaacagctgggatctgaccggaggctaattgtctacgggtggtgtttcctttttcttttcacacaactctactgctgacaactcactgactatccacttgctctcttgtgcctttctgctctggttcaagttccttgattgtttttgactgcttttcactgcttttcttctcacaatccttgctcagttcaaagtc

SEQ ID NO: 3181 - DNA, 549 bp, unidentified
  source 1..549: mol_type = unassigned DNA; note = CK SZ1-L1S sequence
gggggtggggggggcctcggccccctcaccctcttttccggtggccacgcccgggccaccgatacttcccttcactccttcgggactgttggggaggaacacaacagggctcccctgttttcccattccttcccccttttcccaaccccaaccgccgtatctggtggcggcaagacacacgggtctttccctctaaagcacaattgtgtgtgtgtcccaggtcctcctgcgtacggtgcgggagtgctcccacccaactgttgtaagcctgtccaacgcgtcgtcctggcaagactatgacgtcgcatgttccgctgcggatgccgaccgggtaaccggttccccagtgtgtgtagtgcgatcttccaggtcctcctggttggcgttgtccagaaactgcttcaggtaagtggggtgtgcccaatccctacaaaggttgaaccacccaggaatgccagggaggtaccccgcttcacagcgggatctgaccctgggctaattgtctacggtggttcttcttgcttccacttctttctactgttcgccacc

SEQ ID NO: 3182 - DNA, 553 bp, unidentified
  source 1..553: mol_type = unassigned DNA; note = CK Aichi Scan (AV-S) sequence
gggggtggggggggcctcggccccctcaccctcttttccggtggccacgcccgggccaccgatacttcccttcactccttcgggactgttggggaggaacacaacagggctcccctgttttcccattccttcccccttttcccaaccccaaccgccgtatctggtggcggcaagacacacgggtctttccctctaaagcacaattgtgtgtgtgtcccaggtcctcctgcgtacggtgcgggagtgctcccacccaactgttgtaagcctgtccaacgcgtcgtcctggcaagactatgacgtcgcatgttccgctgcggatgccgaccgggtaaccggttccccagtgtgtgtagtgcgatcttccaggtcctcctggttggcgttgtccagaaactgcttcaggtaagtggggtgtgcccaatccctacaaaggttgattctttcaccaccttaggaatgctccggaggtaccccagcaacagctgggatctgaccggaggctaattgtctacgggtggtgtttcatttccaatccttttatgtcggagtc

SEQ ID NO: 3183 - DNA, 667 bp, unidentified
  source 1..667: mol_type = unassigned DNA; note = CK Aichi Loop (AV-L1) sequence
gggggtggggggggcctcggccccctcaccctcttttccggtggccacgcccgggccaccgatacttcccttcactccttcgggactgttggggaggaacacaacagggctcccctgttttcccattccttcccccttttcccaaccccaaccgccgtatctggtggcggcaagacacacgggtctttccctctaaagcacaattgtgtgtgtgtcccaggtcctcctgcgtacggtgcgggagtgctcccacccaactgttgtaagcctgtccaacgcgtcgtcctggcaagactatgacgtcgcatgttccgctgcggatgccgaccgggtaaccggttccccagtgtgtgtagtgcgatcttccaggtcctcctggttggcgttgtccagaaactgcttcaggtaagtggggtgtgcccaatccctacaaaggttgaactgccctaggaatgccaggcaggtaccccacctccgggtgggatctgagcctgggctaattgtctacgggtagttttcctttttcttttcacacaactctactgctgacaactcactgactatccacttgctctcttgtgcctttctgctctggttcaagttccttgattgtttttgactgcttttcactgcttttcttctcacaatccttgctcagttcaaagtc

SEQ ID NO: 3184 - DNA, 693 bp, unidentified
  source 1..693: mol_type = unassigned DNA; note = CK SZ1-L2 sequence
gggggtggggggggcctcggccccctcaccctcttttccggtggccacgcccgggccaccgatacttcccttcactccttcgggactgttggggaggaacacaacagggctcccctgttttcccattccttcccccttttcccaaccccaaccgccgtatctggtggcggcaagacacacgggtctttccctctaaagcacaattgtgtgtgtgtcccaggtcctcctgcgtacggtgcgggagtgctcccacccaactgttgtaagcctgtccaacgcctgatcccccgcggaagctgctcacgtggcaactgtggggacccagacaggttatcaaaggcacccggtctttccgccttcaggagtatccctgctagtgaattctagtagggctctgcttgcgttgtccagaaactgcttcaggtaagtggggtgtgcccaatccctacaaaggttgattctttcaccaccttaggaatgctccggaggtaccccagcaacagctgggatctgaccggaggctaattgtctacgggtggtgtttcctttttcttttcacacaactctactgctgacaactcactgactatccacttgctctcttgtgcctttctgctctggttcaagttccttgattgtttttgactgcttttcactgcttttcttctcacaatccttgctcagttcaaagtc

SEQ ID NO: 3185 - DNA, 671 bp, unidentified
  source 1..671: mol_type = unassigned DNA; note = CK Aichi TriLoop (AV-L2) sequence
gggggtggggggggcctcggccccctcaccctcttttccggtggccacgcccgggccaccgatacttcccttcactccttcgggactgttggggaggaacacaacagggctcccctgttttcccattccttcccccttttcccaaccccaaccgccgtatctggtggcggcaagacacacgggtctttccctctaaagcacaattgtgtgtgtgtcccaggtcctcctgcgtacggtgcgggagtgctcccacccaactgttgtaagcctgtccaacgcatgtgcctggcaagcatatctgagaaggtgttccgctgtggctgccaacctggtgacaggtgccccagtgtgcgtaaccttcttccgtctccggacggtgcgttgtccagaaactgcttcaggtaagtggggtgtgcccaatccctacaaaggttgattctttcaccaccttaggaatgctccggaggtaccccagcaacagctgggatctgaccggaggctaattgtctacgggtggtgtttcctttttcttttcacacaactctactgctgacaactcactgactatccacttgctctcttgtgcctttctgctctggttcaagttccttgattgtttttgactgcttttcactgcttttcttctcacaatccttgctcagttcaaagtc

SEQ ID NO: 3186 - DNA, 523 bp, unidentified
  source 1..523: mol_type = unassigned DNA; note = CK Scan Deletion (?S) sequence
gggggtggggggggcctcggccccctcaccctcttttccggtggccacgcccgggccaccgatacttcccttcactccttcgggactgttggggaggaacacaacagggctcccctgttttcccattccttcccccttttcccaaccccaaccgccgtatctggtggcggcaagacacacgggtctttccctctaaagcacaattgtgtgtgtgtcccaggtcctcctgcgtacggtgcgggagtgctcccacccaactgttgtaagcctgtccaacgcgtcgtcctggcaagactatgacgtcgcatgttccgctgcggatgccgaccgggtaaccggttccccagtgtgtgtagtgcgatcttccaggtcctcctggttggcgttgtccagaaactgcttcaggtaagtggggtgtgcccaatccctacaaaggttgattctttcaccaccttaggaatgctccggaggtaccccagcaacagctgggatctgaccggaggctaattgtctacgggtggtg

SEQ ID NO: 3187 - DNA, 592 bp, unidentified
  source 1..592: mol_type = unassigned DNA; note = CK Loop Deletion (?L1) sequence
gggggtggggggggcctcggccccctcaccctcttttccggtggccacgcccgggccaccgatacttcccttcactccttcgggactgttggggaggaacacaacagggctcccctgttttcccattccttcccccttttcccaaccccaaccgccgtatctggtggcggcaagacacacgggtctttccctctaaagcacaattgtgtgtgtgtcccaggtcctcctgcgtacggtgcgggagtgctcccacccaactgttgtaagcctgtccaacgcgtcgtcctggcaagactatgacgtcgcatgttccgctgcggatgccgaccgggtaaccggttccccagtgtgtgtagtgcgatcttccaggtcctcctggttggcgttgtccagaaactgcttcaggtaagtggggtgtgcccaatccctacaaaggttgatttcctttttcttttcacacaactctactgctgacaactcactgactatccacttgctctcttgtgcctttctgctctggttcaagttccttgattgtttttgactgcttttcactgcttttcttctcacaatccttgctcagttcaaagtc

SEQ ID NO: 3188 - DNA, 572 bp, unidentified
  source 1..572: mol_type = unassigned DNA; note = CK Triloop Deletion (?L2) sequence
gggggtggggggggcctcggccccctcaccctcttttccggtggccacgcccgggccaccgatacttcccttcactccttcgggactgttggggaggaacacaacagggctcccctgttttcccattccttcccccttttcccaaccccaaccgccgtatctggtggcggcaagacacacgggtctttccctctaaagcacaattgtgtgtgtgtcccaggtcctcctgcgtacggtgcgggagtgctcccacccaactgttgtaagcctgtccaacgcgcgttgtccagaaactgcttcaggtaagtggggtgtgcccaatccctacaaaggttgattctttcaccaccttaggaatgctccggaggtaccccagcaacagctgggatctgaccggaggctaattgtctacgggtggtgtttcctttttcttttcacacaactctactgctgacaactcactgactatccacttgctctcttgtgcctttctgctctggttcaagttccttgattgtttttgactgcttttcactgcttttcttctcacaatccttgctcagttcaaagtc

SEQ ID NO: 3189 - DNA, 675 bp, Caprine kobuvirus
  misc_feature 1..675: note = 12Q108
  source 1..675: mol_type = genomic DNA
gggggtggggggggcctcggccccctcaccctcttttccggtggccacgcccgggccaccgatacttcccttcactccttcgggactgttggggaggaacacaacagggctcccctgttttcccattccttcccccttttcccaaccccaaccgccgtatctggtggcggcaagacacacgggtctttccctctaaagcacaattgtgtgtgtgtcccaggtcctcctgcgtacggtgcgggagtgctcccacccaactgttgtaagcctgtccaacgcgtcgtcctggcaagactatgacgtcgcatgttccgctgcggatgccgaccgggtaaccggttccccagtgtgtgtagtgcgatcttccaggtcctcctggttggcgttgtccagaaactgcttcaggtaagtggggtgtgcccaatccctacaaaggttgattctttcaccaccttaggaatgctccggaggtaccccagcaacagctgggatctgaccggaggctaattgtctacgggtggtgtttcctttttcttttcacacaactctactgctgacaactcactgactatccacttgctctcttgtgcctttctgctctggttcaagttccttgattgtttttgactgcttttcactgcttttcttctcacaatccttgctcagttcaaagtc

SEQ ID NO: 3190 - DNA, 577 bp, unidentified
  source 1..577: mol_type = unassigned DNA; note = REV A sequence
ggggtcgccgtcctacacattgttgtgacgtgcggcccagattcgaatctgtaataaaagctttttcttctatatcctcagattggcagtgagaggagattttgttcgtggtgttggctggcctactgggtggggtagggatccggactgaatccgtagtatttcggtacaacatttgggggctcgtccgggattcctccccatcggcagaggtgcctactgtttcttcgaactccggcgccggtaagtaagtacttgattttggtacctcgcgagggtttgggaggatcggagtggcgggacgctgccgggaagctccacctccgctcagcaggggacgccctggtctgagctctgtggtatctgattgttgttgaaccgtctctaagacggtgatactataagtcgtggtttgtgtgtttgtttgttaccttgtgtttgttcgtcacttgtcgacagcgccctgcgaattggtgtacccacaccgcgcggcttgcgaataatactttggagagtcttttgcctccagtgtcttccgtttgtactcgtcctcctctccctctccggccgggatggg

SEQ ID NO: 3191 - DNA, 675 bp, Orivirus sp.
  source 1..675: mol_type = genomic DNA
ggtcccaggccaatattcttcgtaaggcttggttccaattttccaccactcgtgtttgggttctggcctatggtacccagaggggcggtttgggggaattaactccccctcccctgtggtcctataccaccccacacctctgtgggctttctttactatcttcttgttttccgacttttaaacactaggcaggcgcgcctagtcatacaccgcccggctggtctttccagctcttgtgggcggtgcgcgctggtccatcgtgcccagcgacatagcaccttgtggacacctccgaacgccctcccctgtatggggtggtgcccaggggtttcagtgtggtgacacactccctggggcccgaaaggctagtgtgcaacaggtgaggtacagccagctgcccccgtggctggagggaccaagcttgtgaagcacacctcaccttcttgggggtgggctagtaagtggtgaaagcatagtgtccgtgtcgctggccaacactttgggtcaagtccagccactcagtgagtagatgcccaggaggtacccctagtggatctgacttggggcctgttacttaatgcaggttaaaaactatgaaagctgagtagtgtagcccggctggtggcttctcttccttattcattctattttatggtgacaaacgcaactgaagcc

SEQ ID NO: 3192 - DNA, 303 bp, Chicken calicivirus
  source 1..303: mol_type = genomic DNA
ggtgcatcatcactgaacaccctcgggcagagatgcaagggtggaagtcactcctgccccctggcaacatgcaggtgcccgatcccaagcttagttctgacttcctctcctgggtggtgcaacactccaaggttgatgaacaaacctggagggacctctgggcaacctggtctctcgaggatctccggcgcatctccacagactacctcatgctcccggaacctgagaagaacactgatgcctatgatggctggctgatggtcggcgagatgttgacctttgccggtctcattggctgggagg

SEQ ID NO: 3193 - DNA, 240 bp, unidentified
  source 1..240: mol_type = unassigned DNA; note = Ia Io sequence
ggtgtccgggtgtgtgggatagacccagatgtgcagtggatgcgagcatttgagtcagagtaggagcaagcccaggggcaaagggaccacattgtgtatcccgaatgaaggatcgagatttctctcctcattacccggtgtcttgtcactgttgggggggcccaacagtcttagtcctatactgcctgatagggtcgcggctggccggactcaagtgctatagtcagttgattttcactc

SEQ ID NO: 3194 - DNA, 156 bp, Picobirnavirus sp.
  source 1..156: mol_type = genomic DNA
gtaaattaaatgctatttacaaaatttaaacagaaaggagagatgttatgaaccggttttacaaggtttcatacatcgaaaatagcactacctggggcagccgacacactaacatcgtctgtttaaccagaagtgttactgaaaggaggttattta

SEQ ID NO: 3195 - DNA, 675 bp, Lesavirus 1
  source 1..675: mol_type = genomic DNA
gtaactaataagcaagttttactgcctgcaaactgcttcaatgggaccaccgcttcggcgacccctttgttgagtttgtatgtttttaagtaatctttgcaaccatacgattattttagccgcctctctataatgatcttgttatagtgggacgtgaaacattggtttttctcacacacgtccggtcacccgggcgtgtgttcttccgtaagtcctatccacataccatcgtgggtaggccagcatgtttgcacaggctgtgacagtgtgggtgggctttccacctctcaacaacacactgaattgcaatgcactcacggaggaaatgacaatttggttatagttttgaactgtgctagtaatttctttcacattaagccatgttgcctgcggaatcacatgtggtaacacatgcctcagggcccaaaaggcacgggttagcagccccttcatggtgtgttagaagtgaaaacacatagtatgagctataatatctttgttgtcttctctgtagtgtaccccgccaaatgtaaggatgcccagcaggtacccattttatggatctgagctggggattgatagtgtatctataaatgcactgatcaatttaaaaagcgtctaagtttggcacaaacactggggacagtgtttttcctttattcttttatttgatta

SEQ ID NO: 3196 - DNA, 675 bp, Goat torovirus
  source 1..675: mol_type = genomic DNA
gtacttacaagcgggttaaaccgccctccggaacggttacaaccccctcccgaacgtgcgcttgacgtgactggttctcagtctggctttctgagaaatactccagggttgtatcccaccatcttgacctctggtcattttggtaacaccataaccaaacaaactctacacacctaacccacctccagcttgctgcaggccttttggactaaacgggtttaggtgttttgtgaccaactcgtctacccacctccagttttactgcaggcctttttggactaaacggctttagacttttgtggttagtttttaactacccactgtttagccgccaacctgattttcattgttgtaaaattttgtgtttatacactattttcatacggttggcagtttgtttggttgtttgcacagtttttgttgataccaatttttactgtgcttttagtgtattctgctaaggctgtattttacatacttagtttggttgaagcaatttttacaacatttatattgtttttgatttctaaggtaaagagtcttaggaaacaccatagacgccattcttgtggtgtctagttccaactaatctggcaaacaagtaccaagtcattgactcactttggagtgagacttacgagtaccaatttgcctatttcggacatccatataaag

SEQ ID NO: 3197 - DNA, 373 bp, Classical swine fever virus
  source 1..373: mol_type = genomic DNA
gtatacgaggttagttcattctcgtatgcatgattggacaaattaaaatttcaatttggatcagggcctccctccagcgacggccgaactgggctagccatgcccacagtaggactagcaaacggagggactagccgtagtggcgagctccctgggtggtctaagtcctgagtacaggacagtcgtcagtagttcgacgtgagcagaagcccacctcgatatgctatgtggacgagggcatgcccaagacacaccttaaccctagcgggggtcgctagggtgaaatcacaccacgtgatgggagtacgacctgatagggtgctgcagaggcccactattaggctagtataaaaatctctgctgtacatggcac

SEQ ID NO: 3198 - DNA, 373 bp, Classical swine fever virus
  misc_feature 1..373: note = PK15C
  source 1..373: mol_type = genomic DNA
gtatacgaggttagttcattctcgtatgcattattggacaaatcaaaatttcaatttggttcagggcctccctccagcgacggccgaactgggctagccatgcccatagtaggactagcaaacggagggactagccgtagtggcgagctccctgggtgttctaagtcctgagtacaggacagtcgtcagtagttcgacgtgagcagaagcccacctcgagatgctatgtggacgagggcatgcccaagacgcaccttaaccctagcgggggtcgctagggtgaaatcacaccacgtgatgggagtccgacctgatagggtgctgcagaggctcactattaggctagtataaaaatctctgctgtacatggcac

SEQ ID NO: 3199 - DNA, 210 bp, Bat dicibavirus
  source 1..210: mol_type = genomic DNA
gtatagcaccggaatggtattttactactccaagtatacgtactaggagttaaaccctgtaatttacaggggatttagtgacttttatccgtaaaagtcgattggacgttaatcggtaacgaggccaagtaccgtgaaccaatttaaaaacgtattttctcatgtggtagaaccaacttggaaatagcatggcatataggttgtttaggg

SEQ ID NO: 3200 - DNA, 504 bp, Rosavirus B
  source 1..504: mol_type = genomic DNA
gtctctttagtgtctatgcttcagagagcggtgaactgacaccgttgcttcttgcacagcccttcgtgccggtctttccggttctcgacagcgttgggcatcatggctagttaggctaagatagtggatgatctagtgaacagttttggattgtttggagttttgtagcgatgctagtagtgtgtgtggacctccccacgtggtaacacgtgccccacaggccaaaagccaaggtgttgaaagcacccctactagtcccagactcacccatctgggaactcctctcatgaaaaatcttagtaacttttgattcggctattcatcaacctctctagtcaagggctgaaggatgcccggaaggtacccgcaggtaacgataagctcactgtggatctgatccggggctttggtgcgaccgtctgtccggcgtagccagagttaaaaaacgtctaggcccttccaccccaagggattggggtttccccaatcatttgaaagttcact

SEQ ID NO: 3201 - DNA, 675 bp, Encephalomyocarditis virus 1
  misc_feature 1..675: note = JZ1203
  source 1..675: mol_type = genomic DNA
gtctgctcgatatcgcaggctgggtccgtgactacccactccccctttcaacgtgaaggctacgatagtgccagggcgggtactgccgtaagtgccaccccaaaacaacaacaaaccccccctaacattactggccgacgccgcttggaataaggccggtgtgcgtttgtctatatgttatttcccaccacattgccgtcttttggcaatgtgtgggcccggaaacctggccctgtcttcttgacgagcattcctaggggtctttcccctctcgccaaaggaatgcaaggtctgttgaatgtcgtgaaggaagcagttcctctggaagcttcttgaagacaaacaacgtctgtagcggccctttgcaggcagcggaaccccccacctggcgacaggtgcctctgcggccaaaagccacgtgtataagatacacctgcaaaggcggcacaaccccagtgccacgttgtgagttggatagttgtggaaagagtcaaatggctctcctcaagcgtattcaacaaggggctgaaggatgcccagaaggtaccccattgtatgggatctgatctggggcctcggtgcacatgctttacatgtgtttagtcgaggttaaaaaacgtctaggccccccgaaccacggggacgtggttttcctttgaaaaacacgatgataat

SEQ ID NO: 3202 - DNA, 182 bp, Human Cosavirus F
  source 1..182: mol_type = genomic DNA
gtcttaggacgacgcatgtggtatcccagcccccgcctacattggcgggggcttttgaagcaccagacactggatctgatcaggaggagggtagctgctttacagcccctcttaaaaattgcccaaggtccggccacccaacctaggggactaggttttccttttatttttaaattgtcatt

SEQ ID NO: 3203 - DNA, 282 bp, Hubei zhaovirus-like virus 1
  source 1..282: mol_type = genomic DNA
gtgcaggatggcctttcccatcttaagtggtttgtaggatttcgtgggtccataccccccgatttcttggtacgtattccatgcacggagaatacgaccaaaactcttatttcaaaaaatattattttttactcttgtgggctgagtgcgacccaccagttccagcttagcaacctggaagttgttggagatttatggaaccaaattacacatgcgtggagtgccgccactccgtatctgttcactcattacgcgattaagttctgcgacgagacgagcgaa

SEQ ID NO: 3204 - DNA, 628 bp, Saffold virus
  misc_feature 1..628: note = 5?93
  source 1..628: mol_type = genomic DNA
gtgctatcatgcctccccgattatgtgatgttttctgccctgctgggcggagcattctcgggttgagaaaccttgaatctttttctttggaaccttggttcccccggtctaagccgcttggaatatgacagggttattttcttgatcttatttctacttttgcgggttctatccgtaaaaagggtacgtgctgccccttccttctctggagaattcacacggcggtctttccgtctctcaacaagtgtgaatgcagcatgccggaaacggtgaagaaaacagttttctgtggaaatttagagtgcacatcgaaacagctgtagcgacctcacagtagcagcggactcccctcttggcgacaagagcctctgcggccaaaagccccgtggataagatccactgctgtgagcggtgcaaccccagcaccctggttcgatgatcattctctatggaaccagaaaatggttttctcaagccctccggtagagaagccaagaatgtcctgaaggtaccccgcgtgcgggatctgatcaggagaccaattggcggtgctttacactgtcactttggtttaaaaattgtcacagcttctccaaaccaagtggtcttggttttccaattttgttga

SEQ ID NO: 3205 - DNA, 549 bp, unidentified
  source 1..549: mol_type = unassigned DNA; note = CK1.0 sequence
gtggccacgcccgggccaccgatacttcccttcactccttcgggactgttggggaggaacacaacagggctcccctgttttcccattccttcccccttttcccaaccccaaccgccgtatctggtggcggcaagacacacgggtctttccctctaaagcacaattgtgtgtgtgtcccaggtcctcctgcgtacggtgcgggagtgctcccacccaactgttgtaagcctgtccaacgcgtcgtcctggcaagactatgacgtcgcatgttccgctgcggatgccgaccgggtaaccggttccccagtgtgtgtagtgcgatcttccaggtcctcctggttggcgttgtccagaaactgcttcaggtaagtggggtgtgcccaatccctacaaaggttgattctttcaccaccttaggaatgctccggaggtaccccagcaacagctgggatctgaccggaggctaattgtctacgggtggtgtttcctttttcttttcacacaactctactgctgacaactcactgactatccacttgctctgtcacg

SEQ ID NO: 3206 - DNA, 635 bp, Caprine kobuvirus
  misc_feature 1..635: note = 5?40
  source 1..635: mol_type = genomic DNA
gtggccacgcccgggccaccgatacttcccttcactccttcgggactgttggggaggaacacaacagggctcccctgttttcccattccttcccccttttcccaaccccaaccgccgtatctggtggcggcaagacacacgggtctttccctctaaagcacaattgtgtgtgtgtcccaggtcctcctgcgtacggtgcgggagtgctcccacccaactgttgtaagcctgtccaacgcgtcgtcctggcaagactatgacgtcgcatgttccgctgcggatgccgaccgggtaaccggttccccagtgtgtgtagtgcgatcttccaggtcctcctggttggcgttgtccagaaactgcttcaggtaagtggggtgtgcccaatccctacaaaggttgattctttcaccaccttaggaatgctccggaggtaccccagcaacagctgggatctgaccggaggctaattgtctacgggtggtgtttcctttttcttttcacacaactctactgctgacaactcactgactatccacttgctctcttgtgcctttctgctctggttcaagttccttgattgtttttgactgcttttcactgcttttcttctcacaatccttgctcagttcaaagtc

SEQ ID NO: 3207 - DNA, 513 bp, Caprine kobuvirus
  misc_feature 1..513: note = 5?40/3?122
  source 1..513: mol_type = genomic DNA
gtggccacgcccgggccaccgatacttcccttcactccttcgggactgttggggaggaacacaacagggctcccctgttttcccattccttcccccttttcccaaccccaaccgccgtatctggtggcggcaagacacacgggtctttccctctaaagcacaattgtgtgtgtgtcccaggtcctcctgcgtacggtgcgggagtgctcccacccaactgttgtaagcctgtccaacgcgtcgtcctggcaagactatgacgtcgcatgttccgctgcggatgccgaccgggtaaccggttccccagtgtgtgtagtgcgatcttccaggtcctcctggttggcgttgtccagaaactgcttcaggtaagtggggtgtgcccaatccctacaaaggttgattctttcaccaccttaggaatgctccggaggtaccccagcaacagctgggatctgaccggaggctaattgtctacgggtggtgtttcctttttcttttcacacaactaaagtc

SEQ ID NO: 3208 - DNA, 549 bp, Caprine kobuvirus
  misc_feature 1..549: note = 5?40/3?86_Distal
  source 1..549: mol_type = genomic DNA
gtggccacgcccgggccaccgatacttcccttcactccttcgggactgttggggaggaacacaacagggctcccctgttttcccattccttcccccttttcccaaccccaaccgccgtatctggtggcggcaagacacacgggtctttccctctaaagcacaattgtgtgtgtgtcccaggtcctcctgcgtacggtgcgggagtgctcccacccaactgttgtaagcctgtccaacgcgtcgtcctggcaagactatgacgtcgcatgttccgctgcggatgccgaccgggtaaccggttccccagtgtgtgtagtgcgatcttccaggtcctcctggttggcgttgtccagaaactgcttcaggtaagtggggtgtgcccaatccctacaaaggttgattctttcaccaccttaggaatgctccggaggtaccccagcaacagctgggatctgaccggaggctaattgtctacgggtggtgtttcctttttcttttcacacaactctactgctgacaactcactgactatccacttgctctaaagtc

SEQ ID NO: 3209 - DNA, 513 bp, Caprine kobuvirus
  misc_feature 1..513: note = 5?40/3? 122_Kozak
  source 1..513: mol_type = genomic DNA
gtggccacgcccgggccaccgatacttcccttcactccttcgggactgttggggaggaacacaacagggctcccctgttttcccattccttcccccttttcccaaccccaaccgccgtatctggtggcggcaagacacacgggtctttccctctaaagcacaattgtgtgtgtgtcccaggtcctcctgcgtacggtgcgggagtgctcccacccaactgttgtaagcctgtccaacgcgtcgtcctggcaagactatgacgtcgcatgttccgctgcggatgccgaccgggtaaccggttccccagtgtgtgtagtgcgatcttccaggtcctcctggttggcgttgtccagaaactgcttcaggtaagtggggtgtgcccaatccctacaaaggttgattctttcaccaccttaggaatgctccggaggtaccccagcaacagctgggatctgaccggaggctaattgtctacgggtggtgtttcctttttcttttcacacaactgccacc

SEQ ID NO: 3210 - DNA, 549 bp, Caprine kobuvirus
  misc_feature 1..549: note = 5?40/3?86 Proximal
  source 1..549: mol_type = genomic DNA
gtggccacgcccgggccaccgatacttcccttcactccttcgggactgttggggaggaacacaacagggctcccctgttttcccattccttcccccttttcccaaccccaaccgccgtatctggtggcggcaagacacacgggtctttccctctaaagcacaattgtgtgtgtgtcccaggtcctcctgcgtacggtgcgggagtgctcccacccaactgttgtaagcctgtccaacgcgtcgtcctggcaagactatgacgtcgcatgttccgctgcggatgccgaccgggtaaccggttccccagtgtgtgtagtgcgatcttccaggtcctcctggttggcgttgtccagaaactgcttcaggtaagtggggtgtgcccaatccctacaaaggttgattctttcaccaccttaggaatgctccggaggtaccccagcaacagctgggatctgaccggaggctaattgtctacgggtggtgtttcctttttcttttcacacaactttcactgcttttcttctcacaatccttgctcagttcaaagtc

SEQ ID NO: 3211 - DNA, 549 bp, unidentified
  source 1..549: mol_type = unassigned DNA; note = GLuc CK dCTG1 sequence
gtggccacgcccgggccaccgatacttcccttcactccttcgggactgttggggaggaacacaacagggctcccctgttttcccattccttcccccttttcccaaccccaaccgccgtatctggtggcggcaagacacacgggtctttccctctaaagcacaattgtgtgtgtgtcccaggtcctcctgcgtacggtgcgggagtgctcccacccaactgttgtaagcctgtccaacgcgtcgtcctggcaagactatgacgtcgcatgttccgctgcggatgccgaccgggtaaccggttccccagtgtgtgtagtgcgatcttccaggtcctcctggttggcgttgtccagaaactgcttcaggtaagtggggtgtgcccaatccctacaaaggttgattctttcaccaccttaggaatgctccggaggtaccccagcaacagctgggatctgaccggaggctaattgtctacgggtggtgtttcctttttcttttcacacaactctacgtctgacaactcactgactatccacttgctctaaagtc

SEQ ID NO: 3212 - DNA, 549 bp, unidentified
  source 1..549: mol_type = unassigned DNA; note = GLuc CK dCTG1_2 sequence
gtggccacgcccgggccaccgatacttcccttcactccttcgggactgttggggaggaacacaacagggctcccctgttttcccattccttcccccttttcccaaccccaaccgccgtatctggtggcggcaagacacacgggtctttccctctaaagcacaattgtgtgtgtgtcccaggtcctcctgcgtacggtgcgggagtgctcccacccaactgttgtaagcctgtccaacgcgtcgtcctggcaagactatgacgtcgcatgttccgctgcggatgccgaccgggtaaccggttccccagtgtgtgtagtgcgatcttccaggtcctcctggttggcgttgtccagaaactgcttcaggtaagtggggtgtgcccaatccctacaaaggttgattctttcaccaccttaggaatgctccggaggtaccccagcaacagctgggatctgaccggaggctaattgtctacgggtggtgtttcctttttcttttcacacaactctacgtcgtacaactcactgactatccacttgctctaaagtc

SEQ ID NO: 3213 - DNA, 549 bp, unidentified
  source 1..549: mol_type = unassigned DNA; note = GLuc CK dCTG1_2_3 sequence
gtggccacgcccgggccaccgatacttcccttcactccttcgggactgttggggaggaacacaacagggctcccctgttttcccattccttcccccttttcccaaccccaaccgccgtatctggtggcggcaagacacacgggtctttccctctaaagcacaattgtgtgtgtgtcccaggtcctcctgcgtacggtgcgggagtgctcccacccaactgttgtaagcctgtccaacgcgtcgtcctggcaagactatgacgtcgcatgttccgctgcggatgccgaccgggtaaccggttccccagtgtgtgtagtgcgatcttccaggtcctcctggttggcgttgtccagaaactgcttcaggtaagtggggtgtgcccaatccctacaaaggttgattctttcaccaccttaggaatgctccggaggtaccccagcaacagctgggatctgaccggaggctaattgtctacgggtggtgtttcctttttcttttcacacaactctacgtcgtacaactcacgtactatccacttgctctaaagtc

SEQ ID NO: 3214 - DNA, 549 bp, unidentified
  source 1..549: mol_type = unassigned DNA; note = GLuc CK dAll sequence
gtggccacgcccgggccaccgatacttcccttcactccttcgggactgttggggaggaacacaacagggctcccctgttttcccattccttcccccttttcccaaccccaaccgccgtatctggtggcggcaagacacacgggtctttccctctaaagcacaattgtgtgtgtgtcccaggtcctcctgcgtacggtgcgggagtgctcccacccaactgttgtaagcctgtccaacgcgtcgtcctggcaagactatgacgtcgcatgttccgctgcggatgccgaccgggtaaccggttccccagtgtgtgtagtgcgatcttccaggtcctcctggttggcgttgtccagaaactgcttcaggtaagtggggtgtgcccaatccctacaaaggttgattctttcaccaccttaggaatgctccggaggtaccccagcaacagctgggatctgaccggaggctaattgtctacgggtggtgtttcctttttcttttcacacaactctacgtcgtacaactcacgtactactcactgtctctaaagtc

SEQ ID NO: 3215 - DNA, 635 bp, Caprine kobuvirus; identical to SEQ ID NO: 3206
  misc_feature 1..635: note = d40
  source 1..635: mol_type = genomic DNA

SEQ ID NO: 3216 - DNA, 675 bp, Chicken picornavirus 1
  source 1..675: mol_type = genomic DNA
gtggccgacttgcagaacttcctaccgaaccaccacctcacccccataactccttccctctacaccttccgctatggtggttaccactgctttattgccttgactgagaatggccaccccctcgacacctgccccctactgccccaccgcgcaaccttttgcttgtccactcggttggagaggcatgggggccccgttcatatccccagtccagttggtgaccttccccctccccgtccggtagatggtccagagggctttgccgacgccctctatgatgcttgcttgtctttcctccgtcagcgcgagcatgcacttgtcgagcccacggaaacacagcctagcttttgcttctctcaccctgcgtaccctgggcgccttccgctcgagattcgctttgttcgacaccctggcgtccccccaccgctacgtgattttactcgtggcatacaccgccctggcgttcagtacattccactgcctaatttgggtggcctccctcaatctcccgcaccccccattgcgcacgtcatcaccgccgccgctaacgcgatccggcgcggttctcactggcactgtcccctcgtccgccgggtttccactcatggttggcttttcacttattctggttactggtgttccatcctacttcatgatggtcgccatgaccatgac

SEQ ID NO: 3217 - DNA, 675 bp, Miniopterus schreibersii picornavirus 1
  source 1..675: mol_type = genomic DNA
gttgtcgacccgttgcttggtttaagcatgaggtggattcccccgattatgtctacccgttactatggcgggcggtcgtttcagggtgtttctactgaggactgcaccaagtctttatcttttattctcagatctccggctgtttgacgcttgtaggacagcaggactattttctcttaatctttttctacccactagggtcctatcctagtggagggagggtgccaccccttctctctttagagagtgcgcctggcggtctttccgtctctggaaaaaggagcacatggcatgctacaattggcacaagaaaacaagctttgcggattctttctttgtactagaggaagctgtagcgaccctgtatggcgagcggactcccctctcggcgacgagagcctctcgggccaaaagccaagtgttaatagcacccatacaggcggcagtaccccactgccctttctcaacatacaatgactgatgaaccactgttggtttttctgacacctttgtagtaggattccaaggaatgtcctgaaggtaccctgttagcttacgcgcaggatctgatcaggagtctctttacagtgctgtacactgtgcaagggattaaaaattgtttgaggaatccccgagatagtggtctatctcttcctattttgttttacagacacg

SEQ ID NO: 3218 - DNA, 501 bp, Limnipivirus C
  source 1..501: mol_type = genomic DNA
gtttctgagcactggtaagagcttagacaaacgtttttaaaatttattttctctgcaacttttgtttgtgtttatttttatttgttaattttgcgcctaagcatttgttgcgaagtatttgattcattagtaatattacttattgtttatttagatggtattcaaagtggtgggagtatcgaacccaagcgtcgtatgctatctccttgaacaatttttaatcattgcgaagtgatcattgaaaaggataggtgtttaagaactcaaagagtgttaataatgttgggtgacaggtgtccccatagaatttattaacatgatttggactggttatctagtaagaagaaccatcgaacgcacgagcgagcattgcttgcggggcagttaccctgcgtcgatgtaagtgtgtaccggggggtgcacatgttgattctttatggcctgatagggtgcgtcattcgcgcctagataattagtataatgcgaatggaataaatttac

SEQ ID NO: 3219 - DNA, 675 bp, Hunnivirus A1
  source 1..675: mol_type = genomic DNA
taacgtttggcaagaaccctcacctgtcaattgggaccaccactttcagtgaccccatgcgaagtagtgagagagaataagctttcttacccttcatttgtgaacccttcagtcgaagccgcttggaataagataggaggaaaagttcattctaaatggagtgaaacatgtacttcagaatttctagcacgcgctgggctttcttgcgtgtgacggcactgtcttgccggagctctccacactgacaccccacgcttgtggaccttggtggcagatgacaacactgcagctggaattgagtgtctggtacactctgtgtaacagtgaaaacaatgtgatcacttcggtgagctagtagcctgtggaccaacaactggtaacagttgcctcaggggccaaaagccacggtgtttacagcaccctactggtttgattggagcaatccaagatgtcacagagttagtaattgccaagcagtccgtactggtatcttgacataccgtgcagttttggatagtgaaggatgccctgacggtacccataggtaacaagtgacactatggatctaagcaggggctcactctacgctgctttacagctggctgtgagttaaaaaacgtctagctatccacaacctaggggactaggttttccttttatttagattacaattat

SEQ ID NO: 3220 - DNA, 675 bp, Enterovirus AN12
  source 1..675: mol_type = genomic DNA
taccgctgcaccagtgagctggtacgctagtaccttcgcacggagtagatggcatcccccaccccgtaacttagaagcaaagtacacatctggccaatagtggcgctgcatccagccgcgcaacggtcaagcacttctgtttccccggtccgcaagggtcgttatccgcccagtccactacggaaagcctactaaccattgaagctatcgagaggttgcgctcggccacgaccccggtggtagctctgagtgatggggctcgcaaacacccccgtggtaacacggatgcttgcccgcgcgtgcactcgggttcagcctattggttgttcacctcaacatagtgtaaatggccaagagcctactgtgctggattggttttcctccggagccgtgaatgctgctaatcccaacctccgagcgtgtgcgcacaatccagtgttgctacgtcgtaacgcgtaagttggaggcggaacagactactttcggtactccgtgtttcttttgttttattttgaattttatggtgacaattgctgagatttgcgaattagcgactctaccgctgaacattgccctgtactacctaatcgcatttcacaaaacctcagagataccaagctcttacattgatctgcttgttttcctgaatctcaaatataaattggaacaagcaaa

SEQ ID NO: 3221 - DNA, 675 bp, unidentified
  source 1..675: mol_type = unassigned DNA; note = PV3 sequence
tacctttgtacgcctgttttatactccctcccccgcaacttagaagcatacaattcaagctcaataggagggggtgcaagccagcgcctccgtgggcaagcactactgtttccccggtgaggccgcatagactgttcccacggttgaaagtggccgatccgttatccgctcatgtacttcgagaagcctagtatcgctctggaatcttcgacgcgttgcgctcagcactcaaccccggagtgtagcttgggccgatgagtctggacagtccccactggcgacagtggtccaggctgcgctggcggcccacctgtggcccaaagccacgggacgctagttgtgaacagggtgtgaagagcctattgagctacatgagagtcctccggcccctgaatgcggctaatcctaaccatggagcaggcagctgcaacccagcagccagcctgtcgtaacgcgcaagtccgtggcggaaccgactactttgggtgtccgtgtttccttttattcttgaatggctgcttatggtgacaatcatagattgttatcataaagcgagttggattggccatccagtgtgaatcagattaattactcccttgtttgttggatccactcccgaaacgttttactccttaacttattgaaattgtttgaagacaggatttcagtgtcaca

SEQ ID NO: 3222 - DNA, 675 bp, Boone cardiovirus 1
  source 1..675: mol_type = genomic DNA
tacgatcgctgtacattccactactgccaattagctcccccttcccgttgctcccctctataaggagagccttctcttgcaaaggtgaagccttcacccccggtcgaagccgcttggaataagacagggttattttctcctctcctcggcgcttgcctcttctaagctgaataggttctatctattcaggcggatggtctggtccgttccttcttggacagagtgtgtatctgggttttccggatctcgaccacacactcaccagagctcaggagtgattaagtcaaggcccgatctgcggcgaaaaggaaatgaagtattttgcagctgtagcgacctctcaaggccagcggatttccccacctggtgacaggtgcctctggggccaaaagccacgtgttaatagcacccttgagagcggtggtaccccaccaccctgcaaattatggatttgacttagtaactaaaagattgacttggcatacctcaacctgagcggcggctaaggatgccctgaaggtacccgtgttgaaatcgcttcggcgaccatggatctgatcaggggccctgcctggagtggttctatcccacacagcgtagggttaaaaaacgtctaaccgccccacaaagaccccggcagggatgccggtttcctttttaccaattcttgacact

SEQ ID NO: 3223 - DNA, 457 bp, Porcine sapelovirus
  misc_feature 1..457: note = JD2011
  source 1..457: mol_type = genomic DNA
tacgcatgtattccacactcatttcccccctccacccttaaggtggttgtatccccataccttaccctcccttccacaatggacggacaaatggatttgacctcacggcaaacacatatggtatgatttcggatacaccttaacggcagtagcgtggcgagctatggaaaaatcgcaattgtcgatagccatgttagtgacgcgcttcggcgtgctcctttggtgattcggcgactggttacaggagagtaggcagtgagctatgggcaaacctctacagtattacttagagggaatgtgcaattgagacttgacgagcgtctcctcggagatgtggcgcatgctcttggcattaccatagtgagcttccaggttgggaaacctggactgggcctatactacctgatagggtcgcggctggccgcctgtaactagtatagtcagttgaaaccccccc

SEQ ID NO: 3224 - DNA, 608 bp, Kashmir bee virus
  source 1..608: mol_type = genomic DNA
tacgtacaattttgacgcttcgttcatgcaacaatgaactcacatgtggcgctcggtagtaaccagaggggcgtcattcccccgtatggagtggagaatataagctaccgactcgagctgtagaataattcagcaacttataacgaacacgaattttagtcgacgaaaccattttagcctttaattctatgatttgattataatgataaacagctcatgtaactgtctaaactacataaatacaactggattacgaacctttaagtaactatcttagatgaagtctagtagtctcccaatatttccgtgaaaagaatgagggacgagatagctctatttaaagacgtgaggctttaaattctgataaatacattacctgagaattcctcctttaggagttagaatttgaaaagattagtacctatacttaatagaatttaaatatgttaataatgctgaagacaagtatttcgattattaacctctatatttctatataaagtatctgtgagtctcagtggacatcacagtaaggtcgcagttaacttgtaatcttttcattcctgtgtcggagcagtggtaatggagccggacgatttcgccaaaac

SEQ ID NO: 3225 - DNA, 675 bp, unidentified
  source 1..675: mol_type = unassigned DNA; note = Aichivirus rat08 sequence
tactccattcagcttcttcggaacctgttcggaggaattaaacgggcacccactttcctgtcctctccccttttctgtaactccaagtgtgtgctcgtaatcttgactcccgcggattgaccgctccgctggtgaacaaactgctaggtcatctcctccccacccttgggcgtccttccgggcgtccacaccctccccccagcctgacgtgtcacaggctgtacaaagaccccgcgaaagctgctaacgtggcaattgtgggtcccccctttgtaaaggaaccgagtctttctcccttaaggctagacccctgtgtgaattcacaggtggcaactagtggttccactgcatgctcccgacctcggccgcggagtgctgttccccaagtcgtaacactgaccttcacttatgtgcctggcaagcatatctgagaagatgttccgctgtggctgccaaacctggtaacaggtgccccagtgtgcgtagtcttcttccgtcttcggacggtaggtgttaggtaaagatgcggcgtaaggttcaagtgccaacgccctggaagggatgacccttctactgccctaggaatgccgcgcaggtaccccaggttcgcctgggatctgagcgcgggctaattgtctacgggtagtttcatttccctcttcttccactggcatc

SEQ ID NO: 3226 - DNA, 675 bp, unidentified
  source 1..675: mol_type = unassigned DNA; note = Aichivirus DV sequence
tactccattcagcttcttcggaacctgttcggaggaattaaacgggcacccatacacccccacccccttttctgcaacttaagtatgtgtgctcgtaatcttgactcccacggaacggatcgatccgctggagaacaaactgctagatccacatcctcccttcccctgggaggaccccggtcctcccacatcctccccccagcctgacgtaacacaggctgtgtgaagtccccgcgaaagctgctcacgtggcaattgtgggtccccccttcaccaagacaccaggtctttcctccttaaggctagccccgatgtgtgaattcacattgggcaactagtggtgtcactgtgcgctcccaatctcggccgcggagtgctgttccccaagccaaacccctggcccttcactatgtgcctggcaagcatatctgagaaggtgttccgctgtggctgccagcctggtaacaggtgccccagtgtgcgtaaccttcttccgtctccggacggtagtgattggttaagatttggtgtaaggttcatgtgccaacgccctgtgcgggatgaaacctctactgccctaggaatgccaggcaggtaccccaccttcgggtgggatctgagcctgggctaattgtctacgggtagtttcatttccaattcttttatgtcggagtc

SEQ ID NO: 3227 - DNA, 675 bp, unidentified
  source 1..675: mol_type = unassigned DNA; note = Aichivirus DVI2169 sequence
tactccattcagcttcttcggaacctgttcggaggaattaaacgggcacccatacacccccacccccttttctgcaacttaagtatgtgtgctcgtaatcttgactcccacggaatggatcgatccgctggagaacaaactgctagatccacatcctcccttcccctgggaggaccccggtcctcccacatcctccccccagcctgacgtatcacaggctgtgtgaagtccccgcgaaagctgctcacgtggcaattgtgggtccccccttcatcaagacaccaggtctttcctccttaaggctagccccgatgtgtgaattcacattgggcaactagtggtgtcactgtgcgctcccaatctcggccgcggagtgctgttccccaagccaaacccctggcccttcactatgtgcctggcaagcatatctgagaaggtgttccgctgtggctgccagcctggtaacaggtgccccagtgtgcgtaaccttcttccgtctccggacggtagtgattggttaagatttggtgtaaggttcatgtgccaacgccctgtgcgggatgaaacctctactgccctaggaatgccaggcaggtaccccaccttcgggtgggatctgagcctgggctaattgtctacgggtagtttcatttccaattcttttatgtcggagtc

SEQ ID NO: 3228 - DNA, 675 bp, unidentified
  source 1..675: mol_type = unassigned DNA; note = Aichivirus KVGH sequence
tactccattcagcttcttcggaacctgttcggaggaattaaacgggcacccatactcccccccaccccccttttgtaactaagtatgtgtgctcgtgaccttgactcccacggaacggaccgatccgttggtgaacaaacagctaggtccacatcctcctttcccctgggagggtccccgccctcccacatcccccccccagcctgacgtgtcacaggctgtgtgaagcccccgcgaaagctgctcacgtggcaattgtgggtccccccttcatcaagacaccaggtctttcctccttaaggctagccccggcgtgtgaactcacgttgggcaactagtggtgtcactgtgcgctcccaatctcggccgcggagtgctgttccccaagccaaacccctggcccttcactatgtgcctggcaagcacacctgagaaggtgttccgctgtggctgccagcctggtaacaggtgccccagtgtgcgtaaccttcttccgtcttcggacggtggtgattggttaagatttggtgtaaggttcatgtgccaacgccctgtgcgggatgaaacctctactgccctaggaatgccaggcaggtaccccaccttcgggtgggatctgagcctgggctaattgtctacgggtggtttcatttccaattctttcatgtcggagtc

SEQ ID NO: 3229 - DNA, 497 bp, unidentified
  source 1..497: mol_type = unassigned DNA; note = Ludopivirus sequence
tagacccccacctagcccttttccccgtcagtggggggcttactcactgggcatctgttaatctggcctaactagattgacaccactcccttggaacgtaactccacgctaactcactggctctacgcacagacacacggtctttctgctatccccggggaagataccagatggcgaccggctgtcccagcggcctagtagctactcgggttgagtacccaccacggttttgacgcctgctaaaattcaagagacagaggtaggggtgcttagtgtgtgggggaagttcccacaagcgaggcaaagcattgctccctcgcgtcaccgggtgcaaggtaaattggctggacttccgctctacccttgctactcgccctcttcggagggttcgaagtgacactaggtatacgcatggttgggaaaccatgcctggcctactactgggtgatagcctggcggcgggtccgtctcttggcttatacccgttgatttgggat

SEQ ID NO: 3230 - DNA, 675 bp, unidentified
  source 1..675: mol_type = unassigned DNA; note = Kagoshima-2-24-KoV sequence
tatagtttgcctgtttctcgcaccgttaccgctcgttcgggaatgtgaaactggcacccctcctctcccctaccaccctttctccttcgcccccattcataatttacaacgccgcacacagcggcggccgccaagggctagcctggcggttataaaaggaacctgggtctttccctcttcaagccaaaaggtaggttccctgtgtccctgaatgctcggtgaggaatgctgcaccgtaacgctttgtgaagtgtttgcaagttctggcccggcaagcctacagagtgctgtgatccgctgcggacgccatcctggtaacaggacccccagtgtgcgcaacagtatgttcagacttcggtttgttcacttgctttcatggaccattgcgcgaaagtgcgtgcgccatatccctgtacttcaggtgtgcttctctggaccctaggaatgctgcgaaggtaccccgtttcggcgggatctgatcgcaggctaattgtctatgggttcagtttcctttttctttactccacaattgactgcttaactgactctggatcttgtgcttccactgctctttctgctctcaaaacggcttcacttaccaactctcacctttcgaccaacaccatttacacactaacttttttcgactcttctgactcctggcttggtgaagac

SEQ ID NO: 3231 - DNA, 709 bp, unidentified; identical to SEQ ID NO: 1360
  source 1..709: mol_type = unassigned DNA; note = Salivirus NG-J1 sequence

SEQ ID NO: 3232 - DNA, 708 bp, unidentified; identical to SEQ ID NO: 1365
  source 1..708: mol_type = unassigned DNA; note = Salivirus A BN2 sequence

SEQ ID NO: 3233 - DNA, 699 bp, unidentified; identical to SEQ ID NO: 1359
  source 1..699: mol_type = unassigned DNA; note = Salivirus A GUT sequence

SEQ ID NO: 3234 - DNA, 675 bp, Mobovirus A
  source 1..675: mol_type = genomic DNA
tattctcccacaaaccttcttgtaactctgttaagccttttacatccatgtaatttaattttctccacctaaaaggatttcccccatggtcctttttggctcgaacaaatgctacatagggtcttgttttctccccctggctctcttgccagggttccataccccaattcctctatttccatgatttttcatcatggtttatttttactgtcttcttattttctgaggtgaccaactcctaagccgactgggtcgcggaagcccggactcctcgcatcactagggtgcgtagcgatgtaggcgaaaatattggttgctagatgcatacatatagtgaattgatactacaccaaactctgttctttttgaaactagctattttctaagtaaggtaggctacgggtgaaaccttaccattgcaggtacgtgaaccgcaacggacatttggccgaagactggtgtacccacgtcagttataggacctcttcaacgttggtggacggcatgtcactgattagttaggctagtgaatttaagttcagggggtatcttttagcttaagcgtgtattctagtaggacttgcagagcctccccacctaggaggatctctgtttatagccccttttccttgttccgttagttttccacacttttacaatatttgatgatttgtt

SEQ ID NO: 3235 - DNA, 214 bp, Forest pouched giant rat arterivirus
  source 1..214: mol_type = genomic DNA
tattggatccgcctccgggcaaaggttactttcttgtacctcggcttagccacagggtgaccccttgtacgtaggggccccgacgtagcactggtctgacaacaccttctcggcatttcaccttctgcccgctcttccgggcggtggtgtcaagaagcagcagtgctcttctcttttcttcctgcagttcaccgagccctacggggggtaggtg

SEQ ID NO: 3236 - DNA, 591 bp, Sakobuvirus A
  misc_feature 1..591: note = FFUP1 (1x mut)
  source 1..591: mol_type = genomic DNA
tcacgcgcttttccggtggtcacccaccgttagggagcgccagcgttcgcgcttccgctaccaggtgacacactcctttcccctcccccattcccgttcccatcctctggactggtttctcctcacgattgaccagcagctgggagctgttaccagacgttggacagtaagtcccggatgcactatagggctggtggctagtgcttggtaagcactcaacgccatacctaatgtgtacctcggcttgccctcctggtcgtggtgaccggctgtttctcttcccttggctccagacgggctggtgtcctaccaccaccgttgcatgcagacctccccctgcgcactcgaacgccctgtcccagcagggttagtatgtgctgtgcagatctgcatgtgacaccccatccactggtagagcaggaagttgccctagctaacgcggcaagtattactttccgctacacgtccttgagattcctcggacctctggaactagggtgactgtgggcttgggaaaacccaccttggtcctgtactgcctgatagggtcgcggctggccgaccagtggatgtagccagttgttttgggat

SEQ ID NO: 3237 - DNA, 675 bp, unidentified
  source 1..675: mol_type = unassigned DNA; note = EV K sequence
tcagcctgacgcaagtgcctccattggagtctctccaagccctccggggcttggagggcgccgaccccctgcctagggggagcccacgacacggctggagtccattggcacaccgcagccacgattcaagccagaattgaaagcgggaagcacttctgtctccccggtgtggatcatacgctgtacccacggcgaaaagtgaagcatcgttacccgactcggtacttcgagaagcccagtacagttgtggatctctgcagggtatacgctcagcgtgacccctacgtagttccttgagatggctgagagaacaccccacgggcgaccgtgtctctcggcgcgtggctcaaggccgggccttcagtggctcggtgccttgcagagtgaagcctccgaacagcctattgagctaccgtttagcctccgccctcttgaatgcggctaatcctaaccatggagcgcccgcccacagtccagtgggtagagcgtcgtaacgcgcaagtccgtggcggaaccgactactttagagtggcgtgtttccaatttatcctttataaagttgcttatggtgacaccacaagagatccacgatttcttgtttcttatcactgagacacaagtcatattcatcaatctttattgcggaattaacttggtgcgtccaaacacatcagc

SEQ ID NO: 3238 - DNA, 222 bp, Human pegivirus
  misc_feature 1..222: note = isolate JD2B1I
  source 1..222: mol_type = genomic DNA
tcagggttggtaggtcgtaaatcccggtcaccttggtagccactataggtgggtcttaagagaaggttaagattcctcttgtgcctgcggcgagaccgcgcacggtccacaggtgttggccctaccggtgggaataagggcccgacgtcaggctcgtcgttaaaccgagcccgtcacccacctgggcaaacgacgcccacgtacggtccacgtcgcccttca

SEQ ID NO: 3239 - DNA, 675 bp, Human TMEV-like cardiovirus
  source 1..675: mol_type = genomic DNA
tccgacgtggttggaattaacatcttttccgacgaaagtgctattatgcctccccgattgtgtgatgctttctgccctgctgggcggagcgtcctcgggttgagaaaccttgaatcttttcctttggagccttggctcccccggtctaagccgcttggaatatgacagggttattttccaaactctttatttctactttcatgggttctatccatgaaaagggtatgtgttgccccttccttctttggagaatctgcgcggcggtctttccgtctctcaacaggcgtggatgcaacatgccggaaacggtgaagaaaacagttttctgtggaaatttagagtggacatcgaaacagctgtagcgacctcacagtagcagcggattcccctcttggcgacaagagcctctgcggccaaaagccccgtggataagatccactgctgtgagcggtgcaaccccagcaccctggttcgatggccattctctatggaaccagaaaatggttttctcaagccctccggtagagaagccaagaatgtcctgaaggtaccccgcgcgcgggatctgatcaggagaccaattggcagtgctttacgctgccactttggtttaaaaactgtcacagcttctccaaaccaagtggtcttggttttccaattttgttgactgacaat

SEQ ID NO: 3240 - DNA, 650 bp, Salivirus A; identical to SEQ ID NO: 1364
  misc_feature 1..650: note = SZ1
  source 1..650: mol_type = genomic DNA

SEQ ID NO: 3241 - DNA, 653 bp, unidentified
  source 1..653: mol_type = unassigned DNA; note = SV1.0 sequence
tctgtcctcaccccatcttcccttctttcctgcaccgttacgcttactcgcatgtgcattgagtggtgcacgtgcttgaacaaacagctacactcacatgggggcgggttttcccgccctgcggcctctcgcgaggcccacccctccccttcctcccataactacagtgctttggtaggtaagcatcctgatcccccgcggaagctgctcacgtggcaactgtggggacccagacaggttatcaaaggcacccggtctttccgccttcaggagtatccctgctagtgaattctagtagggctctgcttggtgccaacctcccccaaatgcgcgctgcgggagtgctcttccccaactcaccctagtatcctctcatgtgtgtgcttggtcagcatatctgagacgatgttccgctgtcccagaccagtccagtaatggacgggccagtgtgcgtagtcgtcttccggcttgtccggcgcatgtttggtgaaccggtggggtaaggttggtgtgcccaacgcccgtactttggtgatacctcaagaccacccaggaatgccagggaggtaccccgcttcacagcgggatctgaccctgggctaattgtctacggtggttcttcttgcttccacttctttctactgttcgccacc

SEQ ID NO: 3242 - DNA, 650 bp, Salivirus sp.; identical to SEQ ID NO: 1364
  misc_feature 1..650: note = SZ1
  source 1..650: mol_type = genomic DNA

SEQ ID NO: 3243 - DNA, 675 bp, Lesavirus 2
  source 1..675: mol_type = genomic DNA
tctttctttattttcttatgtaactcttctttttaagttttattttgcctacttgtgagcttatgcgggaccactgtcttagacaaccccacatttgtcatgagtaagtacacgcaaccattacgattactttttaaccgtctgaccttttgataacaactgaagttaggcgtgaaacatgcatttataccaaagtagccccgcatttccccactacggtgggggggctaccctactggctttggaactgtagccattatgtgttgcctggctttcaggatctcacaacacaacagttctctcacaatggaatatgggtgagattgcagtgacatgaacaagtatctagtagtacatagactcaagcctagttgcctgcggaacaacatgtggtaacacatgccccagggtccaaaagacaagggttaacagccccttctaggtgtctgtgtgtgaagaatactttagtagtgttgttatgatctcacctgttagtacagaatgagtatggcttggtgaaggatgtcctacaggtacccattatatggatctgagtaggagaccactagtggtggctttaccgccaggtgagtggtttaaaaagcgtctagccaagccaacagcactagggatagtgctttctatattttatattttcagtgtatatggtgacaa

SEQ ID NO: 3244 - DNA, 675 bp, Didelphis aurita
  misc_feature 1..675: note = HAV
  source 1..675: mol_type = genomic DNA
tctttggtctggggaactaaaataccagacccgcgtttgcctagcgatataggctttaattgttgtttgtcattgtgcgtttgatatgtgttttaatgtaaataataattctagcaggttctagttcttgatcatgtcctctttaaggcactcatttcaacttgctatctttcttttcttccttggttctccctacaccaaatgcactggccgctgcgcccggcggggtcaaccacatgattagcatgtggctgtaggtgttgaaggctgggacatgaacatcaatggaatagtgcgcatgcttactggggtccattgaagtagtgggatctttctattggggtaggctacgggtgaaaccccttaggttaatactcatattgagagataccttggataggttaactgtgctggatatggttgagtttaacgacaaaaagccatcaacagctgtggacagaacctcatccttagattgctcactatggatatgtgctctgggcgtgtttcttgcatgatggccattggtcaattcatgcctgggccaatgtaggattagccttaaattactttttaaaagtagcctcatttagctggactaatggtggggcgtatgatcctgcatttggcctctggggtaatcaggggcatttaggtttccacataatagcaaat

SEQ ID NO: 3245 - DNA, 420 bp, Pasivirus A
  misc_feature 1..420: note = (longer)
  source 1..420: mol_type = genomic DNA
tgaaaaagtggttgtgcagctggattttccggctgtgcaactgcttttgaccagtggctctgggttacttagccaaattcctttcccttatccctattggtttgtgttgtgtgttgtttgttttgttttgtcttaactatatacaagatccttcccgccgatacagacctcgacagtctggtgtaggagggttggtgttattaatttgccccaaaagagtgaccgtgacacgtggaaaccatgagtacatgtgtatccgtggaggatcgcccgggactggattccatatcccattgccatcccaacaaacggagggtatacccaccacgtgcgcgtttgcagtgggaatctgcaaatttagtcatactgcctgatagggtgtgggcctgcactttggggtactcaggctgtttatataat

SEQ ID NO: 3246 - DNA, 618 bp, unidentified
  source 1..618: mol_type = unassigned DNA; note = Parabovirus 3?60 sequence
tgaaccgttacgcaccactcagttggtgtttggtggcaccaatgatggaacaaaaggctacaccacttgggctacggcccgcgccaccttgtggcgcaaagacattagaagaatagcataccgcccactagggccctgcagccagcagggtaacgggcaagcacttctgtctccccggtagaacggtataggctgtacccacggccgaaaactgaactatcgttacccgactccgtacttcgcaaagcttagtaggaaactggaaagttcgagttattgacccggagtgttccccccactccagaaacgcgtgatgagggttgccaccccgaccatggcgacatggtgggcatccctgcgctggcacgcggcctctaagaggataactcgctcctactggtaaccgaagagccccgtgagctacggtttattcctccgcctccctgaatgcggctaatcctaacccatgagcagttgccatagatccatatggtggactgtcgtaacgcgtaagttgtgggcggaaccgactactttgggatggcgtgtttccttgttttctccatttgttgttgtatggtgacaagttatagatctcgatctatagcgtttgtaagg

SEQ ID NO: 3247 - DNA, 350 bp, GB virus C
  misc_feature 1..350: note = Iowa
  source 1..350: mol_type = genomic DNA
tgacgtgggggggttgatccgccccccccggcactcggtgcaagccccataaaccgacgcctatctaagtagacgcaatgactcggcgccgactcggcgaccggccaaaaggtggtggatgggtggtgacagggttggtaggtcgtaaatcccggtcatcctggtagccactataggtgggtcttaagagaaggtcaagactcctcttgtgcctgcggcgagaccgcgcacggtccacaggtgctggccctaccggtgtgaataagggcccgacgtcaggctcgtcgttaaaccgagcccgtcacccacctgggcaaacgacgcccacgtacggtccacgtcgcccttca

SEQ ID NO: 3248 - DNA, 281 bp, GB virus C
  misc_feature 1..281: note = GT110
  source 1..281: mol_type = genomic DNA
tgacgtgggggggttgattttccccccccggcactgggtgcaagccccagaaaccgacgcctatctaagtagacgcaatgactcggcgccgactcggcgaccggccaaaaggtggtggatgggtgatgacagggttggtaggtcgtaaatcccggtcatcctggtagccactataggtgggtcttaagagaaggtcaagattcctcttacgcctgcggcgagaccgcgcacggtccacaggtgttggccctaccggtgtgaataagggcccgacatcaggc

SEQ ID NO: 3249 - DNA, 445 bp, Grusopivirus A
  source 1..445: mol_type = genomic DNA
tgcctgagtaggattgtgaatttaggtatgagagggttagccaacccattctgaaccataatagatacgtcaatctgaatccatctaaatctatctcttaggcagtggtgctgaaatattgcaagctactagggatagacgtgatctgattcaagaacctatctaatgtggtgatgagaaggctaggtttatccatagtaatcccttgttctgaacaggcaatgcacatgctctagtaggatctcgggctctgcgattggctctaaaccgaccaatccaggtagaggcactaagtgtaggacttgccaaaatgtattacatgctggtaccgactcactagtctggaaactccacactgaaagtgactggggggggccccatcacatttgtgctactgcttgatagagttgcggctggtcaacttggattggtataaccagttgaa

SEQ ID NO: 3250 - DNA, 611 bp, unidentified
  source 1..611: mol_type = unassigned DNA; note = Parabovirus 5?67 sequence
tgggctacggcccgcgccaccttgtggcgcaaagacattagaagaatagcataccgcccactagggccctgcagccagcagggtaacgggcaagcacttctgtctccccggtagaacggtataggctgtacccacggccgaaaactgaactatcgttacccgactccgtacttcgcaaagcttagtaggaaactggaaagttcgagttattgacccggagtgttccccccactccagaaacgcgtgatgagggttgccaccccgaccatggcgacatggtgggcatccctgcgctggcacgcggcctctaagaggataactcgctcctactggtaaccgaagagccccgtgagctacggtttattcctccgcctccctgaatgcggctaatcctaacccatgagcagttgccatagatccatatggtggactgtcgtaacgcgtaagttgtgggcggaaccgactactttgggatggcgtgtttccttgttttctccatttgttgttgtatggtgacaagttatagatctcgatctatagcgtttcttgagagatttccaaacatttattcaagtcgtacaattcttgtgtttaagcagtacagtgtaagg

SEQ ID NO: 3251 - DNA, 318 bp, Pegivirus A
  misc_feature 1..318: note = 1220
  source 1..318: mol_type = genomic DNA
tgtagcaatgcgcatattgctacttcggtacgcctaattggtaggcgcccggccgaccggccccgcaagggcctagtaggacgtgtgacaatgccatgcgggatcatgacactggggtgagcggaggcagcaccgaagtcgggtgaactcgactcccagtgcgaccacctggcttggtcgttcatggagggcatgcccacgggaacgctgatcgtgcaaagggatgggtccctgcactggtgccatgcgcggcaccactccgtacagcctgatagggtggcggcgggcccccccagtgtgacgtccgtggagcgcaac

SEQ ID NO: 3252 - DNA, 675 bp, Tropivirus A
  source 1..675: mol_type = genomic DNA
tgtcgcatgttgccaacatcaaaattctgggagagtcgcgaactccttaacactgccttgcctcgacggagccgttgttatagtgtcgacgggatacaaacattaaactaaacccacttgcctcgacggaaccccttaccttttattttattttatagtatgaaagtgaatcttgtatgaatgttcatagaaaactgcaaatgagtaccacgtctaacatgagagaatgatactggagaaatccaagtttagaagtcactacgaatcccagcggaaacaagggaattctgagcttctaataggcgtttaagactatttgcaaaattctggtgcgtaagtgatattttcattgcgtagaacgctggtaaccactccggctagtataagcattgttagtcacttattatgaaactccacactatcctttctggagaagcacacaaacttacatggtaaagctagaccattatcttaagcggtgagtacactgcaaccttgtaacaatgcttgtatgactactttttgtatatcttgagcaatattgttgaggtggacatgtccaaaggtaatgttgttgggaatggaggggtccattttcccgtgcacgtagtgtactagtattgggtgatagccttgcggcggatcaaccatgtattttaatccgttgactttcac

SEQ ID NO: 3253 - DNA, 675 bp, unidentified
  source 1..675: mol_type = unassigned DNA; note = EV A114 sequence
tgtgcgcctgttttgaaaccccctcccccaactcgaaacgtagaagtaatgtacactactgatcagtagcaggcgtggcgcaccagccatgtctcgatcaagcacttctgtttccccggactgagtatcaatagactgctcacgcggttgaaggtgaaaacgtccgttacccggctaactacttcgagaaacctagtagcaccatagaaactgcagagtgtttcgctcagcacttcccccgtgtagatcaggtcgatgagtcactgcaatccccacgggtgaccgtggcagtggctgcgttggcggcctgcctatggggcaacccataggacgctctaaggtggacatggtgtgaagagtctattgagctagttagtagtcctccggcccctgaatgcggctaatcctaactgtggagcgcatactcccaaaccagggagcagtgcgtcgtaacgggcaactccgcagcggaaccgactactttgggtgtccgtgtttccttttattcctatactggctgcttatggtgacaattgagagattgttaccatatagctattggattggccatccagtgtgtaatagagcaatcatttaccaatttgttggatttactccattaacccacacgtctctcaacacactacatttcatcttactactgaacactagaaa

SEQ ID NO: 3254 - DNA, 348 bp, Dianke virus
  source 1..348: mol_type = genomic DNA
tgttttcaaccataatactactactacaagtataaaaccccgtccgtctgtcggagacgctaaactctgaccaccaatctagccacatcagttgcttaaagaacctcttgagacactctcccacttaacatcttttaggaatcttcgatgctacaacaacttggctagtgaacaataaatccgtacaattcacagttgtaagaggccataggtccagactttgaaaggtttgtttctattgttacaaatacttagattaacagaggctatttaatagtgctcatcacgttaacagagtaaccttgtgcaatagtatgagcttgttgtaaaacgtcttgatacgacacc

SEQ ID NO: 3255 - DNA, 741 bp, unidentified
  source 1..741: mol_type = unassigned DNA; note = CVB3 sequence
ttaaaacagcctgtgggttgatcccacccacaggcccattgggcgctagcactctggtatcacggtacctttgtgcgcctgttttataccccctcccccaactgtaacttagaagtaacacacaccgatcaacagtcagcgtggcacaccagccacgttttgatcaagcacttctgttaccccggactgagtatcaatagactgctcacgcggttgaaggagaaagcgttcgttatccggccaactacttcgaaaaacctagtaacaccgtggaagttgcagagtgtttcgctcagcactaccccagtgtagatcaggtcgatgagtcaccgcattccccacgggcgaccgtggcggtggctgcgttggcggcctgcccatggggaaacccatgggacgctctaatacagacatggtgcgaagagtctattgagctagttggtagtcctccggcccctgaatgcggctaatcctaactgcggagcacacaccctcaagccagagggcagtgtgtcgtaacgggcaactctgcagcggaaccgactactttgggtgtccgtgtttcattttattcctatactggctgcttatggtgacaattgagagatcgttaccatatagctattggattggccatccggtgactaatagagctattatatatccctttgttgggtttataccacttagcttgaaagaggttaaaacattacaattcattgttaagttgaatacagcaaa

SEQ ID NO: 3256 - DNA, 651 bp, unidentified
  source 1..651: mol_type = unassigned DNA; note = CVB3 3?91 sequence
ttaaaacagcctgtgggttgatcccacccacagggcccattgggcgctagcactctggtatcacggtacctttgtgcgcctgttttataccccctcccccaactgtaacttagaagtaacacacaccgatcaacagtcagcgtggcacaccagccacgttttgatcaagcacttctgttaccccggactgagtatcaatagactgctcacgcggttgaaggagaaagcgttcgttatccggccaactacttcgaaaaacctagtaacaccgtggaagttgcagagtgtttcgctcagcactaccccagtgtagatcaggtcgatgagtcaccgcattccccacgggcgaccgtggcggtggctgcgttggcggcctgcccatggggaaacccatgggacgctctaatacagacatggtgcgaagagtctattgagctagttggtagtcctccggcccctgaatgcggctaatcctaactgcggagcacacaccctcaagccagagggcagtgtgtcgtaacgggcaactctgcagcggaaccgactactttgggtgtccgtgtttcattttattcctatactggctgcttatggtgacaattgagagattgttaccatatagctattggattggccatccggtgaagcaaa

SEQ ID NO: 3257 - DNA, 741 bp, unidentified
  source 1..741: mol_type = unassigned DNA; note = CVB1 sequence
ttaaaacagcctgtgggttgttcccacccacaggcccattgggcgctagcactctggtatcacggtacctttgtgcgcctgttttacatcccctccccaaattgtaatttagaagtttcacacaccgatcattagcaagcgtggcacaccagccatgttttgatcaagcacttctgttaccccggactgagtatcaatagaccgctaacgcggttgaaggagaaaacgttcgttacccggccaactacttcgaaaaacctagtaacaccatggaagttgcggagtgtttcgctcagcactaccccagtgtagatcaggtcgatgagtcaccgcgttccccacgggcgaccgtggcggtggctgcgttggcggcctgcctacggggaaacccgtaggacgctctaatacagacatggtgcgaagagtctattgagctagttggtaatcctccggcccctgaatgcggctaatcctaactgcggagcacataccctcaaaccagggggcagtgtgtcgtaacgggcaactctgcagcggaaccgactactttgggtgtccgtgtttcattttattcctatactggctgcttatggtgacaattgacaggttgttaccatatagttattggattggccatccggtgactaacagagcaattatatatctctttgttgggtttataccacttagcttgaaagaggttaaaacactacatctcatcattaaactaaatacaacaaa

SEQ ID NO: 3258 - DNA, 744 bp, Echovirus
  misc_feature 1..744: note = E14
  source 1..744: mol_type = genomic DNA
ttaaaacagcctgtgggttgttcccatccacagggcccactgggcgccagcactctggtattgcggtaccttagtgcgcctgttttatatacccgtcccccaaacgtaacttagacgcatgtcaacgaagaccaatagtaagcgcagcacaccagctgtgttccggtcaagcacttctgttaccccggaccgagtatcaataagctactcacgtggctgaaggagaaaacgttcgttacccgaccaattacttcaagaaacctagtaacaccatgaaggttgcgcagtgtttcgctccgcacaaccccagtgtagatcaggtcgatgagtcaccgcattccccacgggtgaccgtggcggtggctgcgctggcggcctgcccatggggaaacccatgggacgcttcaatactgacatggtgcgaagagtctattgagctaattggtagtcctccggcccctgaatgcggctaatcctaactgcggagcagatacccacacaccagtgggcagtctgtcgtaacgggcaactctgcagcggaaccgactactttgggtgtccgtgtttctctttatccttatactggctgcttatggtgacaattgagagattgttaccatatagctattggattggccatccggtgacaaatagagcaattgtgtatttgtttgttggtttcgtgccattaaattacaaggttctaaacacccttaatcttattatagcattcaacacaacaaa

SEQ ID NO: 3259 - DNA, 628 bp, unidentified; identical to SEQ ID NO: 754
  source 1..628: mol_type = unassigned DNA; note = HRV14 sequence

SEQ ID NO: 3260 - DNA, 726 bp, Enterovirus D
  source 1..726: mol_type = genomic DNA
ttaaaacagctctggggttgttcccaccccagaggcccacgtggcggctagtactccggtaccccggtacccttgtacgcctgttttatactccctttcccaagtaactttagaagaaataaactaatgttcaacaggagggggtacaaaccagtaccaccacgaacacacacttctgtttccccggtgaagttgcatagactgtacccacggttgaaagcgatgaatccgttacccgcttaggtacttcgagaagcctagtatcatcttggaatcttcgatgcgttgcgatcagcactctaccccgagtgtagcttgggtcgatgagtctggacaccccacaccggcgacgtggtccaggctgcgttggcggcctacccatggctagcaccatgggacgctagttgtgaacaaggtgcgaagagcctattgagctacctgagagtcctccggcccctgaatgcggctaatcccaaccacggagcaaatgctcacaatccagtgagtggtttgtcgtaatgcgcaagtctgtggcggaaccgactactttgggtgtccgtgtttccttttatttttattatggctgcttatggtgacaatctgagattgttatcatatagctattggattagccatccggtgatatcttgaaattttgccataactttttcacaaatcctacaacattacactacactttctcttgaataattgagacaactcata

SEQ ID NO: 3261 - DNA, 626 bp, Human rhinovirus 1
  source 1..626: mol_type = genomic DNA
ttaaaactgggtgtgggttgttcccacccacaccacccaatgggtgttgtactctgttattccggtaactttgtacgccagtttttccctcccctccccatccttttacgtaacttagaagttttaaatacaagaccaatagtaggcaactctccaggttgtctaaggtcaagcacttctgtttccccggttgatgttgatatgctccaacagggcaaaaacaacagataccgttatccgcaaagtgcctacacagagcttagtaggattctgaaagatctttggttggtcgttcagctgcatacccagcagtagaccttgcagatgaggctggacattccccactggtaacagtggtccagcctgcgtggctgcctgcgcacctctcatgaggtgtgaagccaaagatcggacagggtgtgaagagccgcgtgtgctcactttgagtcctccggcccctgaatgcggctaaccttaaacctgcagccatggctcataagccaatgagtttatggtcgtaacgagtaattgcgggatgggaccgactactttgggtgtccgtgtttcactttttcctttattaattgcttatggtgacaatatatatattgatatatattggcatc

SEQ ID NO: 3262 - DNA, 302 bp, unidentified
  source 1..302: mol_type = unassigned DNA; note = Bat Hp-betacoronavirus sequence
ttaagcttcggcttgttgcataggaccggaaaggtactatctaccctaactcttgtagttagactctctaaacgaactttaaaactggttgtgtccttcagtagtctgtatggccattggaggcacaccggtaattatcaaatactaagaagattcatagtacatccttgtctagcttttggttggcagtgagcctacggtttcgtccgtgtcgctcacaattatccacacagtaggtttcgtccgctgtggttgagttgctagtccgttgctgtttcgtcagccatctacaactcgacacc

SEQ ID NO: 3263 - DNA, 675 bp, Apodemus agrarius picornavirus
  misc_feature 1..675: note = strain Longquan-Aa118
  source 1..675: mol_type = genomic DNA
ttactcagcgtaactactccgggttacgtgatgaagaagaggctacggagattctcgggctacggccctggagccactccggctcctaaagatttagaagtttgagcacacccgcccactagggccccccatccaggggggcaacgggcaagcacttctgtttccccggtatgatctgataggctgtaaccacggctgaaacagagattatcgttatccgcttcactacttcgagaagcctagtaatgatgggtgaaattgaatccgttgatccggtgtctcccccacaccagaaactcatgatgagggttgccatcccggctacggcgacgtagcgggcatccctgcgctggcatgaggcctcttaggaggacggatgatatggatcttgtcgtgaagagcctattgagctagtgtcgactcctccgcccccgtgaatgcggctaatcctaaccccggagcaggtgggtccaatccagggcctggcctgtcgtaatgcgtaagtctgggacggaaccgactactttcgggaaggcgtgtttccatttgttcattatttgtgtgtttatggtgacaactctgggtaaacgttctattgcgtttattgagagattcccaacaattgaacaaacgagaactacctgttttattaaatttacacagagaagaattaca

SEQ ID NO: 3264 - DNA, 675 bp, unidentified
  source 1..675: mol_type = unassigned DNA; note = Aichivirus ETHP4 sequence
ttactccattcagcttcttcggaacctgttcggaggaattaaacgggcacccatacacccccaccccctttttgcaacttaagtatgtgtgctcgtgatcttgactcccacggaatggatcgatccgctggagaacaaactgctagatccacatcctcccttcccttgggaggacctcggtcctcccacatcctccccccagcctgacgtaccacaggctgtgtgaagcccccgcgaaagccgctcacgtggcaattgtgggtccccccttcattaagacaccaggtctttcctccttaaggctagtcccgatgtgtgaattcacattgggcaactagtggtgtcactgtgcgctcccaatctcggccgcggagtgctgttccccaagccaaacccctggcccttcactatgtgcctggcaagcatatctgagaaggtgttccgctgtggctgccagcctggtaacaggtgccccagtgtgcgtaaccttcttccgtcttcggacggtagtgattggttaagatttggcgtaaggttcatgtgccaacgccctgtgcgggatgaaacctctactaccctaggaatgccaggcaggtaccccaccctcgggtgggatctgagcctgggctaattgtctacgggtagtttcatttccaattcttctatgtcggagtc

SEQ ID NO: 3265 - DNA, 675 bp, Kobuvirus sp.
  misc_feature 1..675: note = 16317
  source 1..675: mol_type = genomic DNA
ttactccattcagcttcttcggaacctgttcggaggaattaaacgggcacccatacacccccatcccctttctgcaacttaagtatgtgtgctcgtgatcttgactcccacggaatggatcgatccgctggagaacaaactgctagatccacatcctcccttcccctgggaggaccttggtcctcccacatcctccccccagcctgacgtaccacaggctgtgtgaagcccccgcgaaagctgctcacgtggcaattgtgggtccccccttcatcaagacaccaggtctttcctccttaaggctagccccgatgtgtgaattcacattgggcaactagtggtgtcactgtgcgctcccaatctcggccgcggagtgctgttccccaagccaaacccctggcccttcactatgtgcctggcaagcatacctgagaaggtgttccgctgtggctgccagcctggtaacaggtgccccagtgtgcgtaaccttcttccgtcttcggacggtagtgattggttaagatttggtgtaaggtccatgtgccaacgccctgtgcgggatgaaacctctactgccctaggaatgccaggcaggtaccccacccccgggtgggatctgagcctgggctaattgtctacgggtagtttcatttccaattcttttatgtcggagtc

SEQ ID NO: 3266 - DNA, 675 bp, unidentified
  source 1..675: mol_type = unassigned DNA; note = Aichivirus Chshc7 sequence
ttactccattcagcttcttcggaacctgttcggaggaattaaacgggcacccatacatccccatcccctttctgtaacttaagtatgtgtgcttgtaatcttgactcccacggaatggatcgatccgctggagaacaaactgctagatccacatcctcccttcccctgggaggaccttggtcctcccacatcctccccccagcctgacgtaccacaggctgtgtgaagcccccgcgaaagctgctcacgtggcaattgtgggtccccccttcatcaagacaccaggtctttcctccttaaggctagccccgatgtgtgaattcacattgggcaactagtggtgtcactgtgcgctcccaatctcggccgcggagtgctgttccccaagccaaacccctggcccttcactatgtgcctggcaagcatatctgagaaggtgttccgctgtggctgccagcctggtaacaggtgccccagtgtgcgtaaccttcttccgtctccggacggtagtgattggttaagatttggtgtaaggttcatgtgccaacgccctgtgcgggatgaaatctctactgccctaggaatgccaggcaggtaccccaccctcgggtgggatctgagcctgggctaattgtctacgggtagtttcatttccaatccttttatgtcggagtc

SEQ ID NO: 3267 - DNA, 675 bp, unidentified
  source 1..675: mol_type = unassigned DNA; note = A73-675 sequence
ttactccattcagcttcttcggaacctgttcggaggaattaaacgggcacccatactccccccaccccccttttgtaactaagtatgtgtgctcgtgatcttgactcccacggaacggaccgatccgttggtgaacaaacagctaggtccacatcctcccttcccctgggagggcccccgccctcccacatcctccccccagcctgacgtatcacaggctgtgtgaagcccccgcgaaagctgctcacgtggcaattgtgggtccccccttcatcaagacaccaggtctttcctccttaaggctagccccggcgtgtgaattcacgttgggcaactagtggtgtcactgtgcgctcccaatctcggccgcggagtgctgttccccaagccaaacccctggcccttcactatgtgcctggcaagcatatctgagaaggtgttccgctgtggctgccaacctggtgacaggtgccccagtgtgcgtaaccttcttccgtctccggacggtagtgattggttaagatttggtgtaaggttcatgtgccaacgccctgtgcgggatgaaacctctactgccctaggaatgccaggcaggtaccccacctccgggtgggatctgagcctgggctaattgtctacgggtagtttcatttccaatccttttatgtcggagtc

SEQ ID NO: 3268 - DNA, 675 bp, unidentified
  source 1..675: mol_type = unassigned DNA; note = EV I sequence
ttagtactttctcacggggatagtggtatccctccctagtaatttagaagacttgaaaaaccgaccaataggcacctcgcatccagcggggtaaaggtcaagcacttctgtttccccgggtcgagtagcgatagactgtgcccacggtcgaaggtgaaacaacccgttatccgactttgtacttcgggaagcctagtaccaccaaagattatgcttggggtttcgctcagcacgaccctggtgtagatcaggccgatggatcaccgcattcctcacaggcgactgtggcggtggtcgcgtggcagcctgccgatggggcaacccatcggacgccaagcatatgacagggtgtgaagagcctactgagctacaaagtattcctccggcccctgaatgcggctaatcccaaccacggagcatttgctaccaaaccaggtagtggaatgtcgtaacgggtaactctgtggcggaaccgactactttgggtgtccgtgtttccttttaatttatcattctgtatatggtgacaactatagtgctatctcgatttgcattactattgttgagattaaaactttattacattgttgcattttaccctttgagtgagttttcacctgaacagattaatttactcatcctgtttatatattacaagcagaaatacttgcaaag

SEQ ID NO: 3269 - DNA, 549 bp, Rodent hepatovirus
  source 1..549: mol_type = genomic DNA
ttcaaagaggggtccgggattttcctggtccccctctttgggcacccttggctcgggggtgtgaataccgtgctcgcgtttgccgtgcgttaacggcttcatttatgtttgtttgtctgttttattatgttggtttgtctgtttgttatgttggtattgttcgtgtttaatgttatgaccacattacactccagccaatgaagaacagatggtgcggttattgctggcggaattcctaacgtcctggatccgttggtacgcatcacaaaacaatttgcagagagagtggtgaaacggcttgggaatccctgagtacagggaaatcacactgatagctcatcttggctgttttcagtcatggaccttatgcagtgtaatttgggtgtaccccccatagcttaggaggaatgttctgtcttggcactagagtgggacgctgatgcctccgtgtctaggatggtctaagggacagaatggggtgcctctgatgccatactacctgatagggtgctctcacggcctctgcatcttagtgagaagttcaatttt

SEQ ID NO: 3270 - DNA, 734 bp, Hepatitis A Virus
  misc_feature 1..734: note = HA16
  source 1..734: mol_type = genomic DNA
ttcaagaggggtctccggagttttccggaacccctcttggaagtccatggtgaggggacttgatacctcaccgccgtttgcctaggctataggctaaatttccctttccctgtccttcccctatttccttttgttttgtttgtaaatattaattcctgcaggttcagggttctttaatctgtttctctataagaacactcaatttttcacgctttctgtctcctttcttccagggctctccccttgccctaggctctggccgttgcgcccggcggggtcaactccatgattagcatggagctgtaggagtctaaattggggacgcagatgtttgggacgtcgccttgcagtgttaacttggctttcatgaacctctttgatcttccacaaggggtaggctacgggtgaaacctcttaggctaatacttcaatgaagagatgccttggatagggtaacagcggcggatattggtgagttgttaagacaaaaaccattcaacgccggaggactggctctcatccagtggatgcattgagggaattgattgtcagggctgtctctaggtttaatctcagacctctctgtgcttagggcaaacactatttggccttaaatgggatcctgtgagagggggtccctccattgacagctggactgttctttggggccttatgtggtgtttgcctctgaggtactcaggggcatttaggtttttcctcattcttaaataata

SEQ ID NO: 3271 - DNA, 251 bp, Hubei tombus-like virus 32
  source 1..251: mol_type = genomic DNA
ttcgggtttacccgcgtaagcggccacactgactggttgtcggtgttgaatttgtataccagatgaggagacgttaccaccgtctcggcagtgctacgtctgggaaaggactgtgatagtggacagtcctaccgtctttagatacattgcgttgtgtatagcccgggagggattaactaatagcaacgcaatgcacacggcggttcggatttgcttgactgatggaaagacatctaagttctaattgaacc

SEQ ID NO: 3272 - DNA, 624 bp, Salivirus A; identical to SEQ ID NO: 1368
  misc_feature 1..624: note = CH
  source 1..624: mol_type = genomic DNA

SEQ ID NO: 3273 - DNA, 675 bp, Limnipivirus A
  source 1..675: mol_type = genomic DNA
ttctttggatatccatttaacgtgtaccctatacgataattggggtggattctggatgcctagttccagtgattggttaagaactcgtttactacgtatagtatgattagcaaagtgctcgattgatcacgtaatgatctatgtggttaaaaacccagtagtatggtatatactcagtagtgtacactgtgagtacaactcttggcgtagagagaacaattcacccgaatccgtggcgtatccatggaaataagtttacctaattgtatgttacaaggcatatgagacatttatgagatatggtttattttgactaaacgagtgtagaggtggtggagtctatccaacttcaagccatgcaattgttgtgttgattgatatcattgaccatttttgtggattgtgtacacatacaatttgaaaattaaccccctcaagaataagacatgggaccattcgtggtagataccgtgctcggatgcttgagattagatgggttagactagttttggaatgagattgccgagaaagtcccgctagacatgttttacaagtcgtggtattccgctagactttttcgcagacacatggaagggtccatgtgttgtgcaattgcagggtgacagcccaactgcagagttttccttactagaataaaaatctgttgtcaatttt

SEQ ID NO: 3274 - DNA, 604 bp, unidentified; identical to SEQ ID NO: 656
  source 1..604: mol_type = unassigned DNA; note = Aalivirus sequence

SEQ ID NO: 3275 - DNA, 489 bp, Porcine Sapelovirus A2; identical to SEQ ID NO: 513
  source 1..489: mol_type = genomic DNA

SEQ ID NO: 3276 - DNA, 675 bp, Sclerotinia sclerotiorum
  misc_feature 1..675: note = dsRNA mycovirus-L
  source 1..675: mol_type = genomic DNA
ttgaattaatcttttacgtttacgcgcataaaatcaggacacatctcttgtatactttagtatatcaatgatgtttttgttttatgcgattaatcgtaagagaacttctttccatccgcctgtatgggcgggataataagttcaccgccttggtcgaggcgcaaacttgtatgtgcaaaggtgagctatatgctcgaaatagtcgtaactaacacacagccactacctgtagagctctattgatccggaatcctttagtgggaatgcagagctcacaccggacctgcgggtatcttcggcgttagggacttctgtttcagccttgaatcatttacctttataccttctctgaggcgcctgggccgggcgcgatattaagtacaagtcaaggacatcgcgggtagtggtctaatcagccgctagtcctgctggagagttccaacttagttgggtgtggtgcatactagctggatagagtaggtatgtattgctaacgtatgccggaggctatccgtcctcggtagaacgtgccgaggagtagtctctgcagacccccgaacgcgtggggtctttacttaaatgtaggcggagggagcgctcgtaggtggaacgactgcctcccagtcgaatgcaagattttgcacgcggaccagtctgcccggcaattcccgggtg

SEQ ID NO: 3277 - DNA, 608 bp, Kobuvirus sp.
  misc_feature 1..608: note = SZAL6 5?158
  source 1..608: mol_type = genomic DNA
ttgactccaggcggatgttgtgtcgcccgtcctgtgaacaaacagctagacactttcctcccctccctctgggctgctccggcagtccactccctccccccagcgtaacatgccccgctggagtgatgcacctggaagtcgtggacgtgggttagtaacttcggtgaaaacccactataatgacaactggttgacccccacactcaaaggactcgagtctttctcccttaaggctagcccggccacatgaatttgcagctggcaactagtgagtccaccatgtcccgcaacctcggctgcggagtgctgttccccaagcgtatgccttccttctgtaagagtgcgcctggcaagcacatctgagaagtcgttccgctgcgtcgtgccaacctggcgacaggtgacccagtgtgcgtagacttcttccggattcgtccggctcttctctaggaaacatgcgtgtaaggttcatgtgccaaagccctgcgcgcggtgttcttctactgccctaggaatgtgccgcaggtacccctacttcggtagggatctgagcggtagctaattgtctacgggtagtttcatttccatcttctcttcaggtcgacatc

SEQ ID NO: 3278 - DNA, 697 bp, Encephalomyocarditis virus
  misc_feature 1..697: note = EMCV-Cf
  source 1..697: mol_type = genomic DNA
ttgccagtctgctcgatatcgcaggctgggtccgtgactacccactccccctttcaacgtgaaggctacgatagtgccagggcgggtactgccgtaagtgccaccccaaaacaacaacaaccccccctctccctcctccccccctaacgttactggccgaagccgcttggaataaggccggtgtgcgtttgtctatatgttattttccaccatattgccgtcttttggcaatgtgagggcccggaaacctggccctgtcttcttgacgagcattcctaggggtctttcccctctcgccaaaggaatgcaaggtctgttgaatgtcgtgaaggaagcagttcctctggaagcttcttgaagacaaacaacgtctgtagcgaccctttgcaggcagcggaaccccccacctggcgacaggtgcctctgcggccaaaagccacgtgtataagatacacctgcaaaggcggcacaaccccagtgccacgttgtgagttggatagttgtggaaagagtcaaatggctctcctcaagcgtattcaacaaggggctgaaggatgcccagaaggtaccccattgtatgggatctgatctggggcctcggtgcacatgctttacatgtgtttagtcgaggttaaaaaacgtctaggccccccgaaccacggggacgtggttttcctttgaaaaacacgatgataat

SEQ ID NO: 3279 - DNA, 248 bp, Bovine picornavirus
  misc_feature 1..248: note = isolate TCH6
  source 1..248: mol_type = genomic DNA
ttggatctgagcaggggccccctttgggttgctttacaactcaactgggggttaaaaaacgtctaacccgacacgccagagggatctggtttccttttatttcttttactcaccactggatgcagattgacgataaacgttgttgtttgtgactattgacttgatctgcttctacgggtttactttcactgttatacttcttgctttgtttggtgttcactgtactttgtctccttctacatttcaca

SEQ ID NO: 3280 - DNA, 675 bp, Human poliovirus type 2
  misc_feature 1..675: note = isolate IS_061
  source 1..675: mol_type = genomic DNA
ttgtgcgcctgttttatactcccctcccgcaacttagaagcacgaaaccaagttcaatagaagggggtacaaaccagtaccactacgaacaagcacttctgtttccccggtgacattgcatagactgctcacgcggttgaaagtgatcgatccgttacccgcttgtgtacttcgaaaagcctagtatcgccttggaatcttcgacgcgttgcgctcagcacccgaccccggggtgtagcttaggccgatgagtctggacattcctcaccggtgacggtggtccaggctgcgttggcggcctacctatggctaacgccataggacgttagatgtgaacaaggtgtgaagagcctattgagctacataagagtcctccggcccctgaatgcggctaatcctaaccacggagcaggcggtcgcgaaccagtgactggcttgtcgtaacgcgcaagtctgtggcggaaccgactactttgggtgtccgtgtttcctgttatttttatcatggctgcttatggtgacaatcagagattgttatcataaagcgaattggattggccatccggtgagtgttgtgtcaggtatacaactgtttgttggaaccactgtgttagctttgcttctcatttaaccaattaatcaaaaacaatacgaggataaaacaacaatactaca

SEQ ID NO: 3281 - DNA, 675 bp, Human poliovirus type 2
  misc_feature 1..675: note = strain NIE0811460
  source 1..675: mol_type = genomic DNA
ttgtgcgcctgttttatattccccccccgcaacttagaagcacgaaaccaagttcaatagaagggggtacaaaccagtaccaccacgaacaagcacttctgtttccccggtgacattgcatagactgctcacgcggttgaaagtgatcgatccgttacccgcttgtgtacttcgaaaagcctagtattgccttggaatcttcgacgcgttgcgctcagcacccgaccccggggtgtagcttaggctgatgagtctggacattcctcaccggtgacggtggtccaggctgcgttggcggcctacctatggctaatgccataggacgctagatgtgaacaaggtgtgaagagcctattgagctacataagagtcctccggcccctgaatgcggctaatcctaaccacggagcaggcggtcgcaaaccagtgactagcttgtcgtaacgcgcaagtctgtggcggaaccgactactttgggtgtccgtgtttcctgttatttttattatggctgcttatggtgacaatcagagattgttatcataaagcgaattggattggccatccggtgagtgttgtgtcaggtatacaactgtttgttggaaccactgtgttagtttaacctctctttcaaccaattagtcaaaaacaatacgaagatagaacaacaatactaca

SEQ ID NO: 3282 - DNA, 601 bp, Canine kobuvirus; identical to SEQ ID NO: 1354
  source 1..601: mol_type = genomic DNA

SEQ ID NO: 3283 - DNA, 591 bp, Pigeon picornavirus B
  source 1..591: mol_type = genomic DNA
tttatttagctgttaagttttatttgtgccgagaccccatagtaggatcttggtgttccacattaagctctcccgaccacacatccaaacgataggcggtgtaagggctccctggctaagtgtttactcattgctagggaagtgttgcgacccgttaccagtaggaatacaggaggtcttagttgcctaaccagataaagtggtgctgaaatattgcaagctcaatgtctggcgaacgacggactaccgttgaactattgttaacgcccgcgtgtgtaggcaacacacgggttagtaggtcacttacattgacatccgtgccgggaaagcggatctgagctatcgattgcctgatagggtgccggcgggcgcggtacgtgtggtatagtccgctgtcttggggtatggcgtctactcggttttgttgtcgttttggaatgtcccatgtcggagatgtcgttaccggtgtttgctttacttgtgcacgaataagaaaacagagtttggagttttggaagttaatggataacatcaagtttccattgcgttcctcgtgcattttaggccagaaaatcgaccacaaaatcgaga

SEQ ID NO: 3284 - DNA, 619 bp, Bat picornavirus; identical to SEQ ID NO: 715
  misc_feature 1..619: note = isolate BtRs-PicoV
  source 1..619: mol_type = genomic DNA

SEQ ID NO: 3285 - DNA, 675 bp, Potamipivirus B
  source 1..675: mol_type = genomic DNA
tttcaacgtcgtggctgacgttaaaaagccacaattccacttaccttttaccttttatgtttaatgtttgttagttttgtgatctttaacaaatagatctaaataatttgttggtaaccaatctcggatgtttcggctgcattgtagtttatttatttcattttagttgtaggtggccactacgtcctggaatcatacatggtaacatgtacctcggcggttatccactattacgctaatctaagaatatttaaatgaaaatgtaagtgttacggctgactttgggcctgatagttaaatgctcgcactgacagatagtaccctcctttaggatcgattctgttacatgggatccattttggtgccccactgattcaacctctttgttgaaaaagagttagcatactacaaattttccaaacaaaaaccctttttaatgactacaacttatgattttatgaattttactgctcttgaaaaagatattttgacattgatcgctgtactgtttcagacattcattgcatccatttttgttggctactcctcacaaactcaaaacttttccacacgagaaaccttgtttattgaattttgcctttatattttggaacttgttgttggatttattgtttgcttaattattgacctcacacctgttttaaacactacaat

SEQ ID NO: 3286 - DNA, 729 bp, Kobuvirus sp.
  misc_feature 1..729: note = SZAL6 3?37
  source 1..729: mol_type = genomic DNA
tttcacaccctcttttccggtggtccggacccagaccaccgttactccattcagctacttcggtacctgttcggaggaattaaacgggcaccctacccaagggttacatgggaccatattcctcctcccctgtaactttaagttttgtgcccgtattcttgactccaggcggatgttgtgtcgcccgtcctgtgaacaaacagctagacactttcctcccctccctctgggctgctccggcagtccactccctccccccagcgtaacatgccccgctggagtgatgcacctggaagtcgtggacgtgggttagtaacttcggtgaaaacccactataatgacaactggttgacccccacactcaaaggactcgagtctttctcccttaaggctagcccggccacatgaatttgcagctggcaactagtgagtccaccatgtcccgcaacctcggctgcggagtgctgttccccaagcgtatgccttccttctgtaagagtgcgcctggcaagcacatctgagaagtcgttccgctgcgtcgtgccaacctggcgacaggtgacccagtgtgcgtagacttcttccggattcgtccggctcttctctaggaaacatgcgtgtaaggttcatgtgccaaagccctgcgcgcggtgttcttctactgccctaggaatgtgccgcaggtacccctacttcggtagggatctgagcggtagctaattggacatc

SEQ ID NO: 3287 - DNA, 718 bp, Salivirus A; identical to SEQ ID NO: 1367
  misc_feature 1..718: note = 02394
  source 1..718: mol_type = genomic DNA

SEQ ID NO: 3288 - DNA, 576 bp, Porcine kobuvirus
  misc_feature 1..576: note = K-30
  source 1..576: mol_type = genomic DNA
tttgaaaagggggtgggggggcctcggccccctcaccctcttttccggtggccacccgcccgggccaccgttactccactccactccttcgggactggtttggaggaacataacagggcttcccatccctgtttacccttactccactcacccctccccttgaccaaccctatccacaccccactgactgactcctttggatcttgacctcggaatgcctacttgacctcccacttgcctctcccttttcggattgccggtggtgcctggcggaaaaagcacaagtgtgttgttggctaccaaactcctacccgacaaaggtgcgtgtccgcgtgctgagtaatgggataggagatgccaataacaggctcgcccatgagtagagcatggactgcggtgcatgtgacttcggtcaccaggggcatagcattgctcacccctgaatcaagtcatcgagatttctctgacctctgaagtgcactgtggttgcgtggctgggaatccacgcttgaccatgtactgcttgatagagtcgcggctggccgactcatgggttaaagtcagttgacaagacac

SEQ ID NO: 3289 - DNA, 576 bp, Porcine kobuvirus
  misc_feature 1..576: note = GS2
  source 1..576: mol_type = genomic DNA
tttgaaaagggggtgggggggcctcggccccctcaccctcttttccggtggccattcgcccgggccaccgttactccactccactccttcgggactggtttggaggaacacaacagggcttcccatccctgtttaccctttattccatcatcctttccccaagtttaccctatccacaccccactgactgactcctttggattttgacctcagaatgcctatttgacctcccactcgcctctcccttttcggattgccggtggtgcctggcggaaaaagcacaagtgtgttgcaggctaccaaactcctacccgacaaaggtgcgtgtccgcgtgctgagtaatgggataggagatgcctacaacaggctcgcccatgagtagagcatggactgcggtgcatgtgacttcggtcaccacgggcatagcattgctcacccgtgaatcaagtcatcgagatttctctgacctctgaagtgcactgtggttgcgtggctgggaatccacgcttgaccatgtactgcttgatagagtcgcggctggccgactcatgggttaaagtcagttgacaagacac

SEQ ID NO: 3290 - DNA, 494 bp, Tremovirus A
  source 1..494: mol_type = genomic DNA
tttgaaagaggcctccggagtgtccggaggctctctttcgacccaacccatactggggggtgtgtgggaccgtacctggagtgcacggtatatatgcattcccgcatggcaagggcgtgctaccttgccccttgacgcatggtatgcgtcatcatttgccttggttaagccccatagaaacgaggcgtcacgtgccgaaaatccctttgcgtttcacagaaccatcctaaccatgggtgtagtatgggaatcgtgtatggggatgattaggatctctcgtagagggataggtgtgccattcaaatccagggagtactctggctctgacattgggacatttgatgtaaccggacctggttcagtatccgggttgtcctgtattgttacggtgtatccgtcttggcacactgaaagggtatttttgggtaatcctttcctactgcctgatagggtggcgtgcccggccacgagagattaagggtagcaatttaaac

SEQ ID NO: 3291 - DNA, 675 bp, Picornavirales sp.
  misc_feature 1..675: note = isolate RtMruf-PicoV
  source 1..675: mol_type = genomic DNA
tttgctcagcgtaacttctccgggttacgtggagaccaaaaggctacggagactcgggctacggccctggagcacctaggtgctcctaaagacgttagaagttgtacaaactcgcccaatagggccccccaaccaggggggtagcgggcaagcacttctgtttccccggtatgatctcataggctgtacccacggctgaaagagagattatcgttacccgcctcactacttcgagaagcccagtaatggttcatgaagttgatctcgttgacccggtgtttcccccacaccagaaacctgtgatgggggtggtcatcccggtcatggcgacatgacggacctccccgcgccggcacagggcctcttcggaggacgagtgacatggattcaaccgtgaagagcctattgagctagtgttgattcctccgcccccgtgaatgcggctaatcccaactccggagcaggcgggcccaaaccagggtctggcctgtcgtaacgcgaaagtctggagcggaaccgactactttcgggaaggcgtgtttccttttgttccttttatcaagttttatggtgacaactcctggtagacgttttattgcgtttattgagagatttccaacaattgaacagactagaaccacttgttttatcaaaccctcacagaataagataaca

SEQ ID NO: 3292 - DNA, 675 bp, Coxsackievirus
  misc_feature 1..675: note = A10
  source 1..675: mol_type = genomic DNA
tttgtgcgcctgttttacaacccttccccaacttgtaacgtagaagtaatacacactactgatcaatagcaggcatggcgcgccagtcatgtctcgatcaagcacttctgttcccccggactgagtatcaatagactgctcacgcggttgaaggagaaaacgttcgttacccggctaactacttcgagaaacctagtagcaccatagaagctgcagagtgtttcgctcagcacttcccccgtgtagatcaggctgatgagtcactgcaatccccacgggtgaccgtggcagtggctgcgttggcggcctgcctatggggcaacccataggacgctctaatgtggacatggtgcgaagagtctattgagctagttagtagtcctccggcccctgaatgcggctaatcctaactgcggagcacatgccttcaacccagaaggtagtgtgtcgtaacgggcaactctgcagcggaaccgactactttgggtgtccgtgtttctttttattcctatattggctgcttatggtgacaatcacggaattgttgccatatagctattggattggccatccggtgtctaatagagctattgtgtacctatttgttggatttactccgctatcacataaatctctgaacactttgtgctttatattgaacttaaacacccgaaa

SEQ ID NO: 3293 - DNA, 579 bp, Simian sapelovirus 2
  source 1..579: mol_type = genomic DNA
ttttaacttgttatgacattcaaggaaaaaatgtctttttcattatgggactgacctgtttatgaacatgagcagcggcactgctccacgggctatccgtgtaagaaatattgattattcttatggatcatgatttcagggttggccgcccagtctaaaaggcaattgtggtaagctatgtaagtagttggctgttgaaaggagccaagtacatcctaggtctacgctgtgcgggccgaagtaagacttggaacaactctgagtaggcagtttttctctttagcccaacacgaccgcatactgaagagctagaggcactttggggcaaaggtaaaagcattgcttagaccgaatgttcaatgagaccttgacgagtgctgtcacagtgtcccctgatggcagtatggcgcatgctcttggcattacccatatgtgtatctatagggggggggccccctatacttagtctagtgctacctgacagggccgcggctggtcgtcggtgtgtggtataaccagtagtaatcccccatggattgctttaactccccctcctccctcaacaaaactttctctaag

SEQ ID NO: 3294 - DNA, 675 bp, Saffold virus
  misc_feature 1..675: note = V13C
  source 1..675: mol_type = genomic DNA
ttttcgacgtggttggaattgccatcatttccgacgaaagtgctatcatgcctccccgattatgtgatgttttctgccctgctgggcggagcattctcgggttgagaaaccttgaatctttttctttggaaccttggttcccccggtctaagccgcttggaatatgacagggttattttcttgatcttatttctacttttgcgggttctatccgtaaaaagggtacgtgctgccccttccttctctggagaattcacacggcggtctttccgtctctcaacaagtgtgaatgcagcatgccggaaacggtgaagaaaacagttttctgtggaaatttagagtgcacatcgaaacagctgtagcgacctcacagtagcagcggactcccctcttggcgacaagagcctctgcggccaaaagccccgtggataagatccactgctgtgagcggtgcaaccccagcaccctggttcgatgatcattctctatggaaccagaaaatggttttctcaagccctccggtagagaagccaagaatgtcctgaaggtaccccgcgtgcgggatctgatcaggagaccaattggcggtgctttacactgtcactttggtttaaaaattgtcacagcttctccaaaccaagtggtcttggttttccaattttgttgaatggcaat

SEQ ID NO: 3295 - DNA, 512 bp, unidentified
  source 1..512: mol_type = unassigned DNA; note = Boosepivirus B sequence
ttttctcccctccccctccaactaccttttccccctcttgtaacgctagaagtttgtgcaaaccgcctgtagggtactgcaatccagcagtgcataggctaagcttttcttgttaccccaccccacattatactgaggaggattgtgaaattgtgttagtatgggttagtagcggtgacccgggtaaccccaacccagaaactcacggatgagatgaacaggaccccacatggtaacgtgtgtgttcgtctgccccgcaaggtgaggccgtgagagctttgcacgcgaaaaccttgaaaacccaaaagtaccttgagctcttcgctattttgtgtttcctccaggaccctgaatgcggctaaacctaacccgcgatccgcacgtagcaacccagctagagtgtggtcgtaatgcgcaagttgcgggcggtaccgactactttggtgttcctgtgtttcctttattttattttgaatttttatggtgacaacagctagaaaataagagtgaac

SEQ ID NO: 3296 - DNA, 512 bp, Bovine picornavirus; identical to SEQ ID NO: 3295
  source 1..512: mol_type = genomic DNA

SEQ ID NO: 3297 - DNA, 537 bp, Bovine rhinitis A virus
  source 1..537: mol_type = genomic DNA
ttttgcggctctgccgccgttcgggttttacctgttttcacagagcaaaacaggacctctagtttcgtgcttaaacgagatcatgctcgaactagaactataacgctggtcactggacccgtgccgcgccttgcggatctttgcgggaatggtggctagtgggctgtggaagtgactctaaccacacgcccctcaagtgtgggaaaacacgaactggtgtagcgacgacgataggccttgggacaccctctccagtgatggagacccaaggggccaaaagccacgccttgtgccctgtcgttcacaaccccagtgcagttcgtgccagtacctgcttttgggaagtgtgctttggacagctgaaaacagtcctagtgggagactaaggatgcccaggaggtacccggaggtaacaagtgacactctggatctgacttggggagagcgggtctgctttacagacgccactctttaaaaaacttctatgtctcgtcaggcaccggaggccgggccttttcctttaaaacaatacacttt

SEQ ID NO: 3298 - DNA, 593 bp, Rhinolophus picornavirus
  misc_feature 1..593: note = strain Guizhou-Rr100
  source 1..593: mol_type = genomic DNA
ttttttttctcaggcggtagcatccagccaaggcctgatgctaccaacgtgtgactaaaccacactctctttttgtgatacattgtgtcacctatccctttcttggtaacttagaagcttgtacacccacgcacgtaggtaccccacatccagtggggtttgtgcaaagcattcttgttccccggtaaaccctgataggctgtaaccacggctgaaacaaggtttgtcgttacccgactcactactacgcaaagcctagtaaagttcaatgaaagtgcgcagcgtgatccggtcaaaacccccttgaccagaaacacatgatgagggtcaccaacccccactggcgacagtgtggtgtccctgcgttggcatgtggcctcatagaggcgttgcaatctggatttgctccgaagagccccgtgtgctagtgtttatacctccggccccttgaatgcggctaatcctaacccccgagcatgtacacacacgccagtgtgcagcatgtcgtaatgagcaatttggggatggaaccgactactttagggtgtccgtgtttctcattattctttgtttgatgttttatggtgacaaca

SEQ ID NO: 3299 - DNA, 240 bp, synthetic construct
  source 1..240: mol_type = other DNA
gaagaaattctttaagtggatgctctcaaactcagggaaacctaaatctagttatagacaaggcaatcctgagccaagccgaagtagtaattagtaagttaacaatagatgacttacaactaatcggaaggtgcagagactcgacgggagctaccctaacgtcaagacgagggtaaagagagagtccaattctcaaagccaataggcagtagcgaaagctgcaagagaatgaaaatccgt

SEQ ID NO: 3300 - DNA, 239 bp, synthetic construct
  source 1..239: mol_type = other DNA
aagaaattctttaagtggatgctctcaaactcagggaaacctaaatctagttatagacaaggcaatcctgagccaagccgaagtagtaattagtaagttaacaatagatgacttacaactaatcggaaggtgcagagactcgacgggagctaccctaacgtcaagacgagggtaaagagagagtccaattctcaaagccaataggcagtagcgaaagctgcaagagaatgaaaatccgt

SEQ ID NO: 3301 - DNA, 238 bp, synthetic construct
  source 1..238: mol_type = other DNA
agaaattctttaagtggatgctctcaaactcagggaaacctaaatctagttatagacaaggcaatcctgagccaagccgaagtagtaattagtaagttaacaatagatgacttacaactaatcggaaggtgcagagactcgacgggagctaccctaacgtcaagacgagggtaaagagagagtccaattctcaaagccaataggcagtagcgaaagctgcaagagaatgaaaatccgt

SEQ ID NO: 3302 - DNA, 190 bp, synthetic construct
  source 1..190: mol_type = other DNA
gttatagacaaggcaatcctgagccaagccgaagtagtaattagtaagttaacaatagatgacttacaactaatcggaaggtgcagagactcgacgggagctaccctaacgtcaagacgagggtaaagagagagtccaattctcaaagccaataggcagtagcgaaagctgcaagagaatgaaaatccgt

SEQ ID NO: 3303 - DNA, 189 bp, synthetic construct
  source 1..189: mol_type = other DNA
ttatagacaaggcaatcctgagccaagccgaagtagtaattagtaagttaacaatagatgacttacaactaatcggaaggtgcagagactcgacgggagctaccctaacgtcaagacgagggtaaagagagagtccaattctcaaagccaataggcagtagcgaaagctgcaagagaatgaaaatccgt

SEQ ID NO: 3304 - DNA, 188 bp, synthetic construct
  source 1..188: mol_type = other DNA
tatagacaaggcaatcctgagccaagccgaagtagtaattagtaagttaacaatagatgacttacaactaatcggaaggtgcagagactcgacgggagctaccctaacgtcaagacgagggtaaagagagagtccaattctcaaagccaataggcagtagcgaaagctgcaagagaatgaaaatccgt

SEQ ID NO: 3305 - DNA, 187 bp, synthetic construct
  source 1..187: mol_type = other DNA
atagacaaggcaatcctgagccaagccgaagtagtaattagtaagttaacaatagatgacttacaactaatcggaaggtgcagagactcgacgggagctaccctaacgtcaagacgagggtaaagagagagtccaattctcaaagccaataggcagtagcgaaagctgcaagagaatgaaaatccgt

SEQ ID NO: 3306 - DNA, 186 bp, synthetic construct
  source 1..186: mol_type = other DNA
tagacaaggcaatcctgagccaagccgaagtagtaattagtaagttaacaatagatgacttacaactaatcggaaggtgcagagactcgacgggagctaccctaacgtcaagacgagggtaaagagagagtccaattctcaaagccaataggcagtagcgaaagctgcaagagaatgaaaatccgt

SEQ ID NO: 3307 - DNA, 139 bp, synthetic construct
  source 1..139: mol_type = other DNA
acaatagatgacttacaactaatcggaaggtgcagagactcgacgggagctaccctaacgtcaagacgagggtaaagagagagtccaattctcaaagccaataggcagtagcgaaagctgcaagagaatgaaaatccgt

SEQ ID NO: 3308 - DNA, 138 bp, synthetic construct
  source 1..138: mol_type = other DNA
caatagatgacttacaactaatcggaaggtgcagagactcgacgggagctaccctaacgtcaagacgagggtaaagagagagtccaattctcaaagccaataggcagtagcgaaagctgcaagagaatgaaaatccgt

SEQ ID NO: 3309 - DNA, 137 bp, synthetic construct
  source 1..137: mol_type = other DNA
aatagatgacttacaactaatcggaaggtgcagagactcgacgggagctaccctaacgtcaagacgagggtaaagagagagtccaattctcaaagccaataggcagtagcgaaagctgcaagagaatgaaaatccgt

SEQ ID NO: 3310 - DNA, 136 bp, synthetic construct
  source 1..136: mol_type = other DNA
atagatgacttacaactaatcggaaggtgcagagactcgacgggagctaccctaacgtcaagacgagggtaaagagagagtccaattctcaaagccaataggcagtagcgaaagctgcaagagaatgaaaatccgt

SEQ ID NO: 3311 - DNA, 135 bp, synthetic construct
  source 1..135: mol_type = other DNA
tagatgacttacaactaatcggaaggtgcagagactcgacgggagctaccctaacgtcaagacgagggtaaagagagagtccaattctcaaagccaataggcagtagcgaaagctgcaagagaatgaaaatccgt

SEQ ID NO: 3312 - DNA, 134 bp, synthetic construct
  source 1..134: mol_type = other DNA
agatgacttacaactaatcggaaggtgcagagactcgacgggagctaccctaacgtcaagacgagggtaaagagagagtccaattctcaaagccaataggcagtagcgaaagctgcaagagaatgaaaatccgt

SEQ ID NO: 3313 - DNA, 133 bp, synthetic construct
  source 1..133: mol_type = other DNA
gatgacttacaactaatcggaaggtgcagagactcgacgggagctaccctaacgtcaagacgagggtaaagagagagtccaattctcaaagccaataggcagtagcgaaagctgcaagagaatgaaaatccgt

SEQ ID NO: 3314 - DNA, 132 bp, synthetic construct
  source 1..132: mol_type = other DNA
atgacttacaactaatcggaaggtgcagagactcgacgggagctaccctaacgtcaagacgagggtaaagagagagtccaattctcaaagccaataggcagtagcgaaagctgcaagagaatgaaaatccgt

SEQ ID NO: 3315 - DNA, 131 bp, synthetic construct
  source 1..131: mol_type = other DNA
tgacttacaactaatcggaaggtgcagagactcgacgggagctaccctaacgtcaagacgagggtaaagagagagtccaattctcaaagccaataggcagtagcgaaagctgcaagagaatgaaaatccgt

SEQ ID NO: 3316 - DNA, 78 bp, synthetic construct
  source 1..78: mol_type = other DNA
caagacgagggtaaagagagagtccaattctcaaagccaataggcagtagcgaaagctgcaagagaatgaaaatccgt

SEQ ID NO: 3317 - DNA, 77 bp, synthetic construct
  source 1..77: mol_type = other DNA
aagacgagggtaaagagagagtccaattctcaaagccaataggcagtagcgaaagctgcaagagaatgaaaatccgt

SEQ ID NO: 3318 - DNA, 76 bp, synthetic construct
  source 1..76: mol_type = other DNA
agacgagggtaaagagagagtccaattctcaaagccaataggcagtagcgaaagctgcaagagaatgaaaatccgt

SEQ ID NO: 3319 - DNA, 75 bp, synthetic construct
  source 1..75: mol_type = other DNA
gacgagggtaaagagagagtccaattctcaaagccaataggcagtagcgaaagctgcaagagaatgaaaatccgt

SEQ ID NO: 3320 - DNA, 74 bp, synthetic construct
  source 1..74: mol_type = other DNA
acgagggtaaagagagagtccaattctcaaagccaataggcagtagcgaaagctgcaagagaatgaaaatccgt

SEQ ID NO: 3321 - DNA, 40 bp, synthetic construct
  source 1..40: mol_type = other DNA
aataggcagtagcgaaagctgcaagagaatgaaaatccgt

SEQ ID NO: 3322 - DNA, 39 bp, synthetic construct
  source 1..39: mol_type = other DNA
ataggcagtagcgaaagctgcaagagaatgaaaatccgt

SEQ ID NO: 3323 - DNA, 38 bp, synthetic construct
  source 1..38: mol_type = other DNA
taggcagtagcgaaagctgcaagagaatgaaaatccgt

SEQ ID NO: 3324 - DNA, 37 bp, synthetic construct
  source 1..37: mol_type = other DNA
aggcagtagcgaaagctgcaagagaatgaaaatccgt

SEQ ID NO: 3325 - DNA, 36 bp, synthetic construct
  source 1..36: mol_type = other DNA
ggcagtagcgaaagctgcaagagaatgaaaatccgt

SEQ ID NO: 3326 - DNA, 27 bp, synthetic construct
  source 1..27: mol_type = other DNA
gaaagctgcaagagaatgaaaatccgt

SEQ ID NO: 3327 - DNA, 26 bp, synthetic construct
  source 1..26: mol_type = other DNA
aaagctgcaagagaatgaaaatccgt

SEQ ID NO: 3328 - DNA, 25 bp, synthetic construct
  source 1..25: mol_type = other DNA
aagctgcaagagaatgaaaatccgt

SEQ ID NO: 3329 - DNA, 24 bp, synthetic construct
  source 1..24: mol_type = other DNA
agctgcaagagaatgaaaatccgt

SEQ ID NO: 3330 - DNA, 23 bp, synthetic construct
  source 1..23: mol_type = other DNA
gctgcaagagaatgaaaatccgt

SEQ ID NO: 3331 - DNA, 22 bp, synthetic construct
  source 1..22: mol_type = other DNA
ctgcaagagaatgaaaatccgt

SEQ ID NO: 3332 - DNA, 18 bp, synthetic construct
  source 1..18: mol_type = other DNA
aagagaatgaaaatccgt

SEQ ID NO: 3333 - DNA, 17 bp, synthetic construct
  source 1..17: mol_type = other DNA
agagaatgaaaatccgt

SEQ ID NO: 3334 - DNA, 16 bp, synthetic construct
  source 1..16: mol_type = other DNA
gagaatgaaaatccgt

SEQ ID NO: 3335 - DNA, 35 bp, synthetic construct
  source 1..35: mol_type = other DNA
gcagtagcgaaagctgcaagagaatgaaaatccgt

SEQ ID NO: 3336 - DNA, 33 bp, synthetic construct
  source 1..33: mol_type = other DNA
agtagcgaaagctgcaagagaatgaaaatccgt

SEQ ID NO: 3337 - DNA, 32 bp, synthetic construct
  source 1..32: mol_type = other DNA
gtagcgaaagctgcaagagaatgaaaatccgt

SEQ ID NO: 3338 - DNA, 26 bp, synthetic construct
  source 1..26: mol_type = other DNA
acggacttaaataattgagccttaaa

SEQ ID NO: 3339 - DNA, 27 bp, synthetic construct
  source 1..27: mol_type = other DNA
acggacttaaataattgagccttaaag

SEQ ID NO: 3340 - DNA, 28 bp, synthetic construct
  source 1..28: mol_type = other DNA
acggacttaaataattgagccttaaaga

SEQ ID NO: 3341 - DNA, 76 bp, synthetic construct
  source 1..76: mol_type = other DNA
acggacttaaataattgagccttaaagaagaaattctttaagtggatgctctcaaactcagggaaacctaaatcta

SEQ ID NO: 3342 - DNA, 77 bp, synthetic construct
  source 1..77: mol_type = other DNA
acggacttaaataattgagccttaaagaagaaattctttaagtggatgctctcaaactcagggaaacctaaatctag

SEQ ID NO: 3343 - DNA, 78 bp, synthetic construct
  source 1..78: mol_type = other DNA
acggacttaaataattgagccttaaagaagaaattctttaagtggatgctctcaaactcagggaaacctaaatctagt

SEQ ID NO: 3344 - DNA, 79 bp, synthetic construct
  source 1..79: mol_type = other DNA
acggacttaaataattgagccttaaagaagaaattctttaagtggatgctctcaaactcagggaaacctaaatctagtt

SEQ ID NO: 3345 - DNA, 80 bp, synthetic construct
  source 1..80: mol_type = other DNA
acggacttaaataattgagccttaaagaagaaattctttaagtggatgctctcaaactcagggaaacctaaatctagtta

SEQ ID NO: 3346 - DNA, 127 bp, synthetic construct
  source 1..127: mol_type = other DNA
acggacttaaataattgagccttaaagaagaaattctttaagtggatgctctcaaactcagggaaacctaaatctagttatagacaaggcaatcctgagccaagccgaagtagtaattagtaagtta

SEQ ID NO: 3347 - DNA, 128 bp, synthetic construct
  source 1..128: mol_type = other DNA
acggacttaaataattgagccttaaagaagaaattctttaagtggatgctctcaaactcagggaaacctaaatctagttatagacaaggcaatcctgagccaagccgaagtagtaattagtaagttaa

SEQ ID NO: 3348 - DNA, 129 bp, synthetic construct
  source 1..129: mol_type = other DNA
acggacttaaataattgagccttaaagaagaaattctttaagtggatgctctcaaactcagggaaacctaaatctagttatagacaaggcaatcctgagccaagccgaagtagtaattagtaagttaac

SEQ ID NO: 3349 - DNA, 130 bp, synthetic construct
  source 1..130: mol_type = other DNA
acggacttaaataattgagccttaaagaagaaattctttaagtggatgctctcaaactcagggaaacctaaatctagttatagacaaggcaatcctgagccaagccgaagtagtaattagtaagttaaca

SEQ ID NO: 3350 - DNA, 131 bp, synthetic construct
  source 1..131: mol_type = other DNA
acggacttaaataattgagccttaaagaagaaattctttaagtggatgctctcaaactcagggaaacctaaatctagttatagacaaggcaatcctgagccaagccgaagtagtaattagtaagttaacaa

SEQ ID NO: 3351 - DNA, 132 bp, synthetic construct
  source 1..132: mol_type = other DNA
acggacttaaataattgagccttaaagaagaaattctttaagtggatgctctcaaactcagggaaacctaaatctagttatagacaaggcaatcctgagccaagccgaagtagtaattagtaagttaacaat

SEQ ID NO: 3352 - DNA, 133 bp, synthetic construct
  source 1..133: mol_type = other DNA
acggacttaaataattgagccttaaagaagaaattctttaagtggatgctctcaaactcagggaaacctaaatctagttatagacaaggcaatcctgagccaagccgaagtagtaattagtaagttaacaata

SEQ ID NO: 3353 - DNA, 134 bp, synthetic construct
  source 1..134: mol_type = other DNA
acggacttaaataattgagccttaaagaagaaattctttaagtggatgctctcaaactcagggaaacctaaatctagttatagacaaggcaatcctgagccaagccgaagtagtaattagtaagttaacaatag

SEQ ID NO: 3354 - DNA, 135 bp, synthetic construct
  source 1..135: mol_type = other DNA
acggacttaaataattgagccttaaagaagaaattctttaagtggatgctctcaaactcagggaaacctaaatctagttatagacaaggcaatcctgagccaagccgaagtagtaattagtaagttaacaataga

SEQ ID NO: 3355 - DNA, 188 bp, synthetic construct
  source 1..188: mol_type = other DNA
acggacttaaataattgagccttaaagaagaaattctttaagtggatgctctcaaactcagggaaacctaaatctagttatagacaaggcaatcctgagccaagccgaagtagtaattagtaagttaacaatagatgacttacaactaatcggaaggtgcagagactcgacgggagctaccctaacgt

SEQ ID NO: 3356 - DNA, 189 bp, synthetic construct
  source 1..189: mol_type = other DNA
acggacttaaataattgagccttaaagaagaaattctttaagtggatgctctcaaactcagggaaacctaaatctagttatagacaaggcaatcctgagccaagccgaagtagtaattagtaagttaacaatagatgacttacaactaatcggaaggtgcagagactcgacgggagctaccctaacgtc

SEQ ID NO: 3357 - DNA, 190 bp, synthetic construct
  source 1..190: mol_type = other DNA
acggacttaaataattgagccttaaagaagaaattctttaagtggatgctctcaaactcagggaaacctaaatctagttatagacaaggcaatcctgagccaagccgaagtagtaattagtaagttaacaatagatgacttacaactaatcggaaggtgcagagactcgacgggagctaccctaacgtca

SEQ ID NO: 3358 - DNA, 191 bp, synthetic construct
  source 1..191: mol_type = other DNA
acggacttaaataattgagccttaaagaagaaattctttaagtggatgctctcaaactcagggaaacctaaatctagttatagacaaggcaatcctgagccaagccgaagtagtaattagtaagttaacaatagatgacttacaactaatcggaaggtgcagagactcgacgggagctaccctaacgtcaa

SEQ ID NO: 3359 - DNA, 192 bp, synthetic construct
  source 1..192: mol_type = other DNA
acggacttaaataattgagccttaaagaagaaattctttaagtggatgctctcaaactcagggaaacctaaatctagttatagacaaggcaatcctgagccaagccgaagtagtaattagtaagttaacaatagatgacttacaactaatcggaaggtgcagagactcgacgggagctaccctaacgtcaag

SEQ ID NO: 3360 - DNA, 226 bp, synthetic construct
  source 1..226: mol_type = other DNA
acggacttaaataattgagccttaaagaagaaattctttaagtggatgctctcaaactcagggaaacctaaatctagttatagacaaggcaatcctgagccaagccgaagtagtaattagtaagttaacaatagatgacttacaactaatcggaaggtgcagagactcgacgggagctaccctaacgtcaagacgagggtaaagagagagtccaattctcaaagcc

SEQ ID NO: 3361 - DNA, 227 bp, synthetic construct
  source 1..227: mol_type = other DNA
acggacttaaataattgagccttaaagaagaaattctttaagtggatgctctcaaactcagggaaacctaaatctagttatagacaaggcaatcctgagccaagccgaagtagtaattagtaagttaacaatagatgacttacaactaatcggaaggtgcagagactcgacgggagctaccctaacgtcaagacgagggtaaagagagagtccaattctcaaagcca

SEQ ID NO: 3362 - DNA, 228 bp, synthetic construct
  source 1..228: mol_type = other DNA
acggacttaaataattgagccttaaagaagaaattctttaagtggatgctctcaaactcagggaaacctaaatctagttatagacaaggcaatcctgagccaagccgaagtagtaattagtaagttaacaatagatgacttacaactaatcggaaggtgcagagactcgacgggagctaccctaacgtcaagacgagggtaaagagagagtccaattctcaaagccaa

SEQ ID NO: 3363 - DNA, 229 bp, synthetic construct
  source 1..229: mol_type = other DNA
acggacttaaataattgagccttaaagaagaaattctttaagtggatgctctcaaactcagggaaacctaaatctagttatagacaaggcaatcctgagccaagccgaagtagtaattagtaagttaacaatagatgacttacaactaatcggaaggtgcagagactcgacgggagctaccctaacgtcaagacgagggtaaagagagagtccaattctcaaagccaat

SEQ ID NO: 3364 - DNA, 230 bp, synthetic construct
  source 1..230: mol_type = other DNA
acggacttaaataattgagccttaaagaagaaattctttaagtggatgctctcaaactcagggaaacctaaatctagttatagacaaggcaatcctgagccaagccgaagtagtaattagtaagttaacaatagatgacttacaactaatcggaaggtgcagagactcgacgggagctaccctaacgtcaagacgagggtaaagagagagtccaattctcaaagccaata

SEQ ID NO: 3365 - DNA, 239 bp, synthetic construct
  source 1..239: mol_type = other DNA
acggacttaaataattgagccttaaagaagaaattctttaagtggatgctctcaaactcagggaaacctaaatctagttatagacaaggcaatcctgagccaagccgaagtagtaattagtaagttaacaatagatgacttacaactaatcggaaggtgcagagactcgacgggagctaccctaacgtcaagacgagggtaaagagagagtccaattctcaaagccaataggcagtagc

SEQ ID NO: 3366 - DNA, 240 bp, synthetic construct
  source 1..240: mol_type = other DNA
acggacttaaataattgagccttaaagaagaaattctttaagtggatgctctcaaactcagggaaacctaaatctagttatagacaaggcaatcctgagccaagccgaagtagtaattagtaagttaacaatagatgacttacaactaatcggaaggtgcagagactcgacgggagctaccctaacgtcaagacgagggtaaagagagagtccaattctcaaagccaataggcagtagcg

SEQ ID NO: 3367 - DNA, 241 bp, synthetic construct
  source 1..241: mol_type = other DNA
acggacttaaataattgagccttaaagaagaaattctttaagtggatgctctcaaactcagggaaacctaaatctagttatagacaaggcaatcctgagccaagccgaagtagtaattagtaagttaacaatagatgacttacaactaatcggaaggtgcagagactcgacgggagctaccctaacgtcaagacgagggtaaagagagagtccaattctcaaagccaataggcagtagcga

SEQ ID NO: 3368 - DNA, 242 bp, synthetic construct
  source 1..242: mol_type = other DNA
acggacttaaataattgagccttaaagaagaaattctttaagtggatgctctcaaactcagggaaacctaaatctagttatagacaaggcaatcctgagccaagccgaagtagtaattagtaagttaacaatagatgacttacaactaatcggaaggtgcagagactcgacgggagctaccctaacgtcaagacgagggtaaagagagagtccaattctcaaagccaataggcagtagcgaa

SEQ ID NO: 3369 - DNA, 243 bp, synthetic construct
  source 1..243: mol_type = other DNA
acggacttaaataattgagccttaaagaagaaattctttaagtggatgctctcaaactcagggaaacctaaatctagttatagacaaggcaatcctgagccaagccgaagtagtaattagtaagttaacaatagatgacttacaactaatcggaaggtgcagagactcgacgggagctaccctaacgtcaagacgagggtaaagagagagtccaattctcaaagccaataggcagtagcgaaa

SEQ ID NO: 3370 - DNA, 244 bp, synthetic construct
  source 1..244: mol_type = other DNA
acggacttaaataattgagccttaaagaagaaattctttaagtggatgctctcaaactcagggaaacctaaatctagttatagacaaggcaatcctgagccaagccgaagtagtaattagtaagttaacaatagatgacttacaactaatcggaaggtgcagagactcgacgggagctaccctaacgtcaagacgagggtaaagagagagtccaattctcaaagccaataggcagtagcgaaag

SEQ ID NO: 3371 - DNA, 248 bp, synthetic construct
  source 1..248: mol_type = other DNA
acggacttaaataattgagccttaaagaagaaattctttaagtggatgctctcaaactcagggaaacctaaatctagttatagacaaggcaatcctgagccaagccgaagtagtaattagtaagttaacaatagatgacttacaactaatcggaaggtgcagagactcgacgggagctaccctaacgtcaagacgagggtaaagagagagtccaattctcaaagccaataggcagtagcgaaagctgc

SEQ ID NO: 3372 - DNA, 249 bp, synthetic construct
  source 1..249: mol_type = other DNA
acggacttaaataattgagccttaaagaagaaattctttaagtggatgctctcaaactcagggaaacctaaatctagttatagacaaggcaatcctgagccaagccgaagtagtaattagtaagttaacaatagatgacttacaactaatcggaaggtgcagagactcgacgggagctaccctaacgtcaagacgagggtaaagagagagtccaattctcaaagccaataggcagtagcgaaagctgca

SEQ ID NO: 3373 - DNA, 250 bp, synthetic construct
  source 1..250: mol_type = other DNA
acggacttaaataattgagccttaaagaagaaattctttaagtggatgctctcaaactcagggaaacctaaatctagttatagacaaggcaatcctgagccaagccgaagtagtaattagtaagttaacaatagatgacttacaactaatcggaaggtgcagagactcgacgggagctaccctaacgtcaagacgagggtaaagagagagtccaattctcaaagccaataggcagtagcgaaagctgcaa

SEQ ID NO: 3374 - DNA, 231 bp, synthetic construct
  source 1..231: mol_type = other DNA
acggacttaaataattgagccttaaagaagaaattctttaagtggatgctctcaaactcagggaaacctaaatctagttatagacaaggcaatcctgagccaagccgaagtagtaattagtaagttaacaatagatgacttacaactaatcggaaggtgcagagactcgacgggagctaccctaacgtcaagacgagggtaaagagagagtccaattctcaaagccaatag

SEQ ID NO: 3375 - DNA, 233 bp, synthetic construct
  source 1..233: mol_type = other DNA
acggacttaaataattgagccttaaagaagaaattctttaagtggatgctctcaaactcagggaaacctaaatctagttatagacaaggcaatcctgagccaagccgaagtagtaattagtaagttaacaatagatgacttacaactaatcggaaggtgcagagactcgacgggagctaccctaacgtcaagacgagggtaaagagagagtccaattctcaaagccaataggc

SEQ ID NO: 3376 - DNA, 234 bp, synthetic construct
  source 1..234: mol_type = other DNA
acggacttaaataattgagccttaaagaagaaattctttaagtggatgctctcaaactcagggaaacctaaatctagttatagacaaggcaatcctgagccaagccgaagtagtaattagtaagttaacaatagatgacttacaactaatcggaaggtgcagagactcgacgggagctaccctaacgtcaagacgagggtaaagagagagtccaattctcaaagccaataggca

SEQ ID NO: 3377 - DNA, 104 bp, Azoarcus olearius
  source 1..104: mol_type = genomic DNA
tgcgccgatgaaggtgtagagactagacggcacccacctaaggcaaacgctatggtgaaggcatagtccagggagtggcgaaagtcacacaaaccggaatccgt

SEQ ID NO: 3378 - DNA, 141 bp, Azoarcus olearius
  source 1..141: mol_type = genomic DNA
ccgggcgtatggcaacgccgagccaagcttcggcgcctgcgccgatgaaggtgtagagactagacggcacccacctaaggcaaacgctatggtgaaggcatagtccagggagtggcgaaagtcacacaaaccggaatccgt

SEQ ID NO: 3379 - DNA, 78 bp, Azoarcus olearius
  source 1..78: mol_type = genomic DNA
acggcacccacctaaggcaaacgctatggtgaaggcatagtccagggagtggcgaaagtcacacaaaccggaatccgt

SEQ ID NO: 3380 - DNA, 58 bp, Azoarcus olearius
  source 1..58: mol_type = genomic DNA
acgctatggtgaaggcatagtccagggagtggcgaaagtcacacaaaccggaatccgt

SEQ ID NO: 3381 - DNA, 75 bp, Thiomargarita namibiensis
  source 1..75: mol_type = genomic DNA
attaaagttatagaattatcagagaatgatatagtccaagccttatggtaacatgagggcacttgaccctggtag

SEQ ID NO: 3382 - DNA, 195 bp, unidentified
  source 1..195: mol_type = unassigned DNA; note = Staphylococcus phage Twort sequence
aagatgtaggcaatcctgagctaagctcttagtaataagagaaagtgcaacgactattccgataggaagtagggtcaagtgactcgaaatggggattacccttctagggtagtgatatagtctgaacatatatggaaacatatagaaggataggagtaacgaacctattcgtaacataattgaacttttagttat

SEQ ID NO: 3383 - DNA, 163 bp, unidentified
  source 1..163: mol_type = unassigned DNA; note = Staphylococcus phage Twort sequence
taataagagaaagtgcaacgactattccgataggaagtagggtcaagtgactcgaaatggggattacccttctagggtagtgatatagtctgaacatatatggaaacatatagaaggataggagtaacgaacctattcgtaacataattgaacttttagttat

SEQ ID NO: 3384 - DNA, 133 bp, unidentified
  source 1..133: mol_type = unassigned DNA; note = Staphylococcus phage Twort sequence
taggaagtagggtcaagtgactcgaaatggggattacccttctagggtagtgatatagtctgaacatatatggaaacatatagaaggataggagtaacgaacctattcgtaacataattgaacttttagttat

SEQ ID NO: 3385 - DNA, 92 bp, unidentified
  source 1..92: mol_type = unassigned DNA; note = Staphylococcus phage Twort sequence
ctagggtagtgatatagtctgaacatatatggaaacatatagaaggataggagtaacgaacctattcgtaacataattgaacttttagttat

SEQ ID NO: 3386 - DNA, 92 bp, Aspergillus pseudoglaucus
  source 1..92: mol_type = genomic DNA
agttaataaagatgatgaaatagtctgaaccattttgagaaaagtggaaataaaagaaaatcttttatgataacataaattgaacaggctaa

SEQ ID NO: 3387 - DNA, 62 bp, unidentified
  source 1..62: mol_type = unassigned DNA; note = Bacteriophage Phi I sequence
caaagactgatgatatagtccgacactcctagtaataggagaatacagaaaggatgaaatcc

SEQ ID NO: 3388 - DNA, 76 bp, Nostoc sp.
  misc_feature 1..76: note = PCC 7524
  source 1..76: mol_type = genomic DNA
agtcgagggtaaagggagagtccaattctcaaagcctattggcagtagcgaaagctgcgggagaatgaaaatccgt

SEQ ID NO: 3389 - DNA, 76 bp, Nostoc sp.
  misc_feature 1..76: note = CENA543
  source 1..76: mol_type = genomic DNA
agccgagggtaaagggagagtccaattctcaaagccaataggcagtagcgaaagctgcgggagaatgaaaatccgt

SEQ ID NO: 3390 - DNA, 89 bp, Nodularia spumigena
  source 1..89: mol_type = genomic DNA
agccgagggtaaagggagagtccaattctcaaagccgaaggttattaaaacctggcagcagtgaaagctgcgggagaatgaaaatccgt

SEQ ID NO: 3391 - DNA, 79 bp, Pleurocapsa sp.
  misc_feature 1..79: note = PCC 7327
  source 1..79: mol_type = genomic DNA
agctgagggtaaagagagagtccaattctcaaagccagcagatggcagtagcgaaagctgcgggagaatgaaaatccgt

SEQ ID NO: 3392 - DNA, 76 bp, Planktothrix agardhii
  source 1..76: mol_type = genomic DNA
agccgagggtaaagagagagtccaattctcaaagccaattggtagtagcgaaagctacgggagaatgaaaatccgt

SEQ ID NO: 3393 - DNA, 118 bp, Azoarcus olearius
  source 1..118: mol_type = genomic DNA
gcggactcatatttcgatgtgccttgcgccgggaaaccacgcaagggatggtgtcaaattcggcgaaacctaagcgcccgcccgggcgtatggcaacgccgagccaagcttcggcgcc

SEQ ID NO: 3394 - DNA, 81 bp, Azoarcus olearius
  source 1..81: mol_type = genomic DNA
gcggactcatatttcgatgtgccttgcgccgggaaaccacgcaagggatggtgtcaaattcggcgaaacctaagcgcccgc

SEQ ID NO: 3395 - DNA, 144 bp, Azoarcus olearius
  source 1..144: mol_type = genomic DNA
gcggactcatatttcgatgtgccttgcgccgggaaaccacgcaagggatggtgtcaaattcggcgaaacctaagcgcccgcccgggcgtatggcaacgccgagccaagcttcggcgcctgcgccgatgaaggtgtagagactag

SEQ ID NO: 3396 - DNA, 164 bp, Azoarcus olearius
  source 1..164: mol_type = genomic DNA
gcggactcatatttcgatgtgccttgcgccgggaaaccacgcaagggatggtgtcaaattcggcgaaacctaagcgcccgcccgggcgtatggcaacgccgagccaagcttcggcgcctgcgccgatgaaggtgtagagactagacggcacccacctaaggcaa

SEQ ID NO: 3397 - DNA, 179 bp, Thiomargarita namibiensis
  source 1..179: mol_type = genomic DNA
aggattagatactacactaagtgtcccccagactggtgacagtctggtgtgcatccagctatatcggtgaaaccccattggggtaataccgagggaagctatattatatatatattaataaatagccccgtagagactatgtaggtaaggagatagaagatgataaaatcaaaatcatc

SEQ ID NO: 3398 - DNA, 84 bp, unidentified
  source 1..84: mol_type = unassigned DNA; note = Staphylococcus phage Twort sequence
actactgaaagcataaataattgtgcctttatacagtaatgtatatcgaaaaatcctctaattcagggaacacctaaacaaact

SEQ ID NO: 3399 - DNA, 116 bp, unidentified
  source 1..116: mol_type = unassigned DNA; note = Staphylococcus phage Twort sequence
actactgaaagcataaataattgtgcctttatacagtaatgtatatcgaaaaatcctctaattcagggaacacctaaacaaactaagatgtaggcaatcctgagctaagctcttag

SEQ ID NO: 3400 - DNA, 146 bp, unidentified
  source 1..146: mol_type = unassigned DNA; note = Staphylococcus phage Twort sequence
actactgaaagcataaataattgtgcctttatacagtaatgtatatcgaaaaatcctctaattcagggaacacctaaacaaactaagatgtaggcaatcctgagctaagctcttagtaataagagaaagtgcaacgactattccga

SEQ ID NO: 3401 - DNA, 187 bp, unidentified
  source 1..187: mol_type = unassigned DNA; note = Staphylococcus phage Twort sequence
actactgaaagcataaataattgtgcctttatacagtaatgtatatcgaaaaatcctctaattcagggaacacctaaacaaactaagatgtaggcaatcctgagctaagctcttagtaataagagaaagtgcaacgactattccgataggaagtagggtcaagtgactcgaaatggggattaccctt

SEQ ID NO: 3402 - DNA, 216 bp, Aspergillus pseudoglaucus
  source 1..216: mol_type = genomic DNA
cgctagggatttataactgtgagtcctccaatattataaaatgttggtaatatattgggtaaatttcaaagacaacttttctccacgtcaggatatagtgtatttgaagcgaaacttattttagcagtgaaaaagcaaataaggacgttcaacgactaaaaggtgagtattgctaacaataatccttttttttaatgcccaacatctttattaact

SEQ ID NO: 3403 - DNA, 559 bp, unidentified
  source 1..559: mol_type = unassigned DNA; note = Bacteriophage Phi I sequence
gtgggtgcataaactatttcattgtgcacattaaatctggtgaactcggtgaaaccctaatggggcaataccgagccaagccatagggaggatatatgagaggcaagaagttaattcttgaggccactgagactggctgtatcatccctacgtcacacaaacttaatgccgatggttatttcagaaagaaaaccaatggcgtcttagagatgtatcacagaacggtgtggaaggagcataacggagacatacctgatggcttcgagatagaccataagtgtcgcaatagggcttgctgtaatatagagcatttacagatgcttgagggtacagcccacactgttaagaccaatcgtgaacgctacgcagacagaaaggaaacagctagggaatactggctggagactggatgtaccggcctagcactcggtgagaagtttggtgtgtcgttctcttctgcttgtaagtggattagagaatggaaggcgtagagactatccgaaaggagtagggccgagggtgagactccctcgtaacccgaagcgccagacagtcaact

SEQ ID NO: 3404 - DNA, 218 bp, Nostoc sp.
  misc_feature 1..218: note = PCC 7524
  source 1..218: mol_type = genomic DNA
acggacttaagtaattgagccttaaagaagaaattctttaagtggcagctctcaaactcagggaaacctaaatctgttcacagacaaggcaatcctgagccaagccgaaagagtcatgagtgctgagtagtgagtaaaataaaagctcacaactcagaggttgtaactctaagctagtcggaaggtgcagagactcgacgggagctaccctaacgtaa

SEQ ID NO: 3405 - DNA, 165 bp, Nostoc sp.
  misc_feature 1..165: note = CENA543
  source 1..165: mol_type = genomic DNA
acggacttaaactgaattgagccttagagaagaaattctttaagtgtcagctctcaaactcagggaaacctaaatctgttgacagacaaggcaatcctgagccaagccgagaactctaagttattcggaaggtgcagagactcgacgggagctaccctaacgtca

SEQ ID NO: 3406 - DNA, 181 bp, Nodularia spumigena
  source 1..181: mol_type = genomic DNA
acggacttagaaaactgagccttgatcgagaaatctttcaagtggaagctctcaaattcagggaaacctaaatctgtttacagatatggcaatcctgagccaagccgaaacaagtcctgagtgttaaagctcataactcatcggaaggtgcagagactcgacgggagctaccctaacgtta

SEQ ID NO: 3407 - DNA, 188 bp, Pleurocapsa sp.
  misc_feature 1..188: note = PCC 7327
  source 1..188: mol_type = genomic DNA
acggacttaaaaaaattgagccttggcagagaaatctgtcatgcgaacgctctcaaattcagggaaacctaagtctggcaacagatatggcaatcctgagccaagccttaatcaaggaaaaaaacatttttaccttttaccttgaaaggaaggtgcagagactcaacgggagctaccctaacaggtca

SEQ ID NO: 3408 - DNA, 200 bp, Planktothrix agardhii
  source 1..200: mol_type = genomic DNA
acggacttaaagataaattgagccttgaggcgagaaatctctcaagtgtaagctgtcaaattcagggaaacctaaatctgtaaattcagacaaggcaatcctgagccaagcctaggggtattagaaatgagggagtttccccaatctaagatcaatacctaggaaggtgcagagactcgacgggagctaccctaacgtta

SEQ ID NO: 3409 - DNA, 162 bp, synthetic construct
  source 1..162: mol_type = other DNA
gctgcgagccacggacttaaataattgagccttaaagaagaaattctttaagtggatgctctcaaactcagggaaacctaaatctagttatagacaaggcaatcctgagccaagccgaagtagtaattagtaagttaacaacacaaacacaacttatatact

SEQ ID NO: 3410 - DNA, 172 bp, synthetic construct
  source 1..172: mol_type = other DNA
gctgcgagccacggacttaaataattgagccttaaagaagaaattctttaagtggatgctctcaaactcagggaaacctaaatctagttatagacaaggcaatcctgagccaagccgaagtagtaattagtaagttaacaacacaaacacaagagtataagtataatttcag

SEQ ID NO: 3411 - DNA, 182 bp, synthetic construct
  source 1..182: mol_type = other DNA
gctgcgagccacggacttaaataattgagccttaaagaagaaattctttaagtggatgctctcaaactcagggaaacctaaatctagttatagacaaggcaatcctgagccaagccgaagtagtaattagtaagttaacaacacaaacacaagtcatatactgagtataagtataatttcag

SEQ ID NO: 3412 - DNA, 192 bp, synthetic construct
  source 1..192: mol_type = other DNA
gctgcgagccacggacttaaataattgagccttaaagaagaaattctttaagtggatgctctcaaactcagggaaacctaaatctagttatagacaaggcaatcctgagccaagccgaagtagtaattagtaagttaacaacacaaacacaagtcatatactgagtataagtataatttcatattgttgatg

SEQ ID NO: 3413 - DNA, 202 bp, synthetic construct
  source 1..202: mol_type = other DNA
gctgcgagccacggacttaaataattgagccttaaagaagaaattctttaagtggatgctctcaaactcagggaaacctaaatctagttatagacaaggcaatcctgagccaagccgaagtagtaattagtaagttaacaacacaaacacaagcgataatgcttcatatactgagtataagtatagtttcatattgttgatg

SEQ ID NO: 3414 - DNA, 162 bp, synthetic construct
  source 1..162: mol_type = other DNA
gctgcgagccacggacttaaataattgagccttaaagaagaaattctttaagtggatgctctcaaactcagggaaacctaaatctagttatagacaaggcaatcctgagccaagccgaagtagtaattagtaagttaacaaaacaaaaacaagctgacgcta

SEQ ID NO: 3415 - DNA, 172 bp, synthetic construct
  source 1..172: mol_type = other DNA
gctgcgagccacggacttaaataattgagccttaaagaagaaattctttaagtggatgctctcaaactcagggaaacctaaatctagttatagacaaggcaatcctgagccaagccgaagtagtaattagtaagttaacaaaacaaaaacaagctgacgctagtatgagtat

SEQ ID NO: 3416 - DNA, 182 bp, synthetic construct
  source 1..182: mol_type = other DNA
gctgcgagccacggacttaaataattgagccttaaagaagaaattctttaagtggatgctctcaaactcagggaaacctaaatctagttatagacaaggcaatcctgagccaagccgaagtagtaattagtaagttaacaaaacaaaaacaagctgacgctagtatgagtatagcttcacac

SEQ ID NO: 3417 - DNA, 192 bp, synthetic construct
  source 1..192: mol_type = other DNA
gctgcgagccacggacttaaataattgagccttaaagaagaaattctttaagtggatgctctcaaactcagggaaacctaaatctagttatagacaaggcaatcctgagccaagccgaagtagtaattagtaagttaacaaaacaaaaacaagctgacgctagtatgagtatagcttcacactcaggtgagg

SEQ ID NO: 3418 - DNA, 202 bp, synthetic construct
  source 1..202: mol_type = other DNA
gctgcgagccacggacttaaataattgagccttaaagaagaaattctttaagtggatgctctcaaactcagggaaacctaaatctagttatagacaaggcaatcctgagccaagccgaagtagtaattagtaagttaacaaaacaaaaacaagctgacgctagtatgagtatagcttcacactcaggtgaggcatcattcgg

SEQ ID NO: 3419 - DNA, 162 bp, synthetic construct
  source 1..162: mol_type = other DNA
gctgcgagccacggacttaaataattgagccttaaagaagaaattctttaagtggatgctctcaaactcagggaaacctaaatctagttatagacaaggcaatcctgagccaagccgaagtagtaattagtaagttaacaaaacaaaaacaagctcgcaccg

SEQ ID NO: 3420 - DNA, 172 bp, synthetic construct
  source 1..172: mol_type = other DNA
gctgcgagccacggacttaaataattgagccttaaagaagaaattctttaagtggatgctctcaaactcagggaaacctaaatctagttatagacaaggcaatcctgagccaagccgaagtagtaattagtaagttaacaaaacaaaaacaagctcgcactgggtcggagcg

SEQ ID NO: 3421 - DNA, 182 bp, synthetic construct; identical to SEQ ID NO: 3411
  source 1..182: mol_type = other DNA

SEQ ID NO: 3422 - DNA, 182 bp, synthetic construct; identical to SEQ ID NO: 3411
  source 1..182: mol_type = other DNA

SEQ ID NO: 3423 - DNA, 182 bp, synthetic construct; identical to SEQ ID NO: 3411
  source 1..182: mol_type = other DNA

SEQ ID NO: 3424 - DNA, 182 bp, synthetic construct; identical to SEQ ID NO: 3411
  source 1..182: mol_type = other DNA

SEQ ID NO: 3425 - DNA, 182 bp, synthetic construct
  source 1..182: mol_type = other DNA
gctgcgagccacggacttaaataattgagccttaaagaagaaattctttaagtggatgctctcaaactcagggaaacctaaatctagttatagacaaggcaatcctgagccaagccgaagtagtaattagtaagttaacaacacaaacacaagtaacttagagagtataagtataatttcag

SEQ ID NO: 3426 - DNA, 182 bp, synthetic construct
  source 1..182: mol_type = other DNA
gctgcgagccacggacttaaataattgagccttaaagaagaaattctttaagtggatgctctcaaactcagggaaacctaaatctagttatagacaaggcaatcctgagccaagccgaagtagtaattagtaagttaacaacacaaacacaagtaacttagatgtaacacacataatttcag

SEQ ID NO: 3427 - DNA, 182 bp, synthetic construct
  source 1..182: mol_type = other DNA
gctgcgagccacggacttaaataattgagccttaaagaagaaattctttaagtggatgctctcaaactcagggaaacctaaatctagttatagacaaggcaatcctgagccaagccgaagtagtaattagtaagttaacaacacaaacacaagtaacttagatgtaacacacaccgatcaac

SEQ ID NO: 3428 - DNA, 182 bp, synthetic construct
  source 1..182: mol_type = other DNA
ctgtttaatcacggacttaaataattgagccttaaagaagaaattctttaagtggatgctctcaaactcagggaaacctaaatctagttatagacaaggcaatcctgagccaagccgaagtagtaattagtaagttaacaacacaaacacaagtcatatactgagtataagtataatttcag

SEQ ID NO: 3429 - DNA, 192 bp, synthetic construct
  source 1..192: mol_type = other DNA
cgtaatttatattgtgaatcacggacttaaataattgagccttaaagaagaaattctttaagtggatgctctcaaactcagggaaacctaaatctagttatagacaaggcaatcctgagccaagccgaagtagtaattagtaagttaacaacacaaacacaagtcatatactgagtataagtataatttcag

SEQ ID NO: 3430 - DNA, 182 bp, synthetic construct
  source 1..182: mol_type = other DNA
gctatgatccacggacttaaataattgagccttaaagaagaaattctttaagtggatgctctcaaactcagggaaacctaaatctagttatagacaaggcaatcctgagccaagccgaagtagtaattagtaagttaacaacacaaacacaagtcatatactgagtataagtataatttcag

SEQ ID NO: 3431 - DNA, 192 bp, synthetic construct
  source 1..192: mol_type = other DNA
cggatattatgctgcgatccacggacttaaataattgagccttaaagaagaaattctttaagtggatgctctcaaactcagggaaacctaaatctagttatagacaaggcaatcctgagccaagccgaagtagtaattagtaagttaacaacacaaacacaagtcatatactgagtataagtataatttcag

SEQ ID NO: 3432 - DNA, 192 bp, synthetic construct
  source 1..192: mol_type = other DNA
cggtaggcgcgctgcgagccacggacttaaataattgagccttaaagaagaaattctttaagtggatgctctcaaactcagggaaacctaaatctagttatagacaaggcaatcctgagccaagccgaagtagtaattagtaagttaacaacacaaacacaagtcatatactgagtataagtataatttcag

SEQ ID NO: 3433 - DNA, 215 bp, synthetic construct
  source 1..215: mol_type = other DNA
gcgctaacgtcgacgccggcaaacggtaggcgcgctgcgagccacggacttaaataattgagccttaaagaagaaattctttaagtggatgctctcaaactcagggaaacctaaatctagttatagacaaggcaatcctgagccaagccgaagtagtaattagtaagttaacaacacaaacacaagtcatatactgagtataagtataatttcag

SEQ ID NO: 3434 - DNA, 215 bp, synthetic construct
  source 1..215: mol_type = other DNA
gcatgtcacttgtatcctcgaaacggatattatgctgcgatccacggacttaaataattgagccttaaagaagaaattctttaagtggatgctctcaaactcagggaaacctaaatctagttatagacaaggcaatcctgagccaagccgaagtagtaattagtaagttaacaacacaaacacaagtcatatactgagtataagtataatttcag

SEQ ID NO: 3435 - DNA, 215 bp, synthetic construct
  source 1..215: mol_type = other DNA
gttagagttatcatttatcgaaacgtaatttagattgtgaatcacggacttaaataattgagccttaaagaagaaattctttaagtggatgctctcaaactcagggaaacctaaatctagttatagacaaggcaatcctgagccaagccgaagtagtaattagtaagttaacaacacaaacacaagtcatatactgagtataagtataatttcag

SEQ ID NO: 3436 - DNA, 152 bp, synthetic construct
  source 1..152: mol_type = other DNA
gctgcgagccacggacttaaataattgagccttaaagaagaaattctttaagtggatgctctcaaactcagggaaacctaaatctagttatagacaaggcaatcctgagccaagccgaagtagtaattagtaagttaacaacacaaacacaa

SEQ ID NO: 3437 - DNA, 157 bp, synthetic construct
  source 1..157: mol_type = other DNA
gctgcgagccacggacttaaataattgagccttaaagaagaaattctttaagtggatgctctcaaactcagggaaacctaaatctagttatagacaaggcaatcctgagccaagccgaagtagtaattagtaagttaacaaaacaaaaacaagcccg

SEQ ID NO: 3438 - DNA, 182 bp, synthetic construct
  source 1..182: mol_type = other DNA
gctgcgagccacggacttaaataattgagccttaaagaagaaattctttaagtggatgctctcaaactcagggaaacctaaatctagttatagacaaggcaatcctgagccaagccgaagtagtaattagtaagttaacaaaacaaaaacaagctcgcactggccggaagctcgtcggagcg

SEQ ID NO: 3439 - DNA, 251 bp, synthetic construct
  source 1..251: mol_type = other DNA
gctgcgagccacggacttaaataattgagccttaaagaagaaattctttaagtggatgctctcaaactcagggaaacctaaatctagttatagacaaggcaatcctgagccaagccgaagtagtaattagtaagttaacaatagatgacttacaactaatcggaaggtgcagagactcgacgggagctaccctaacgtcaagacgagggtaaagagagagtccaattctcaaagccaatacacaaacacaa

SEQ ID NO: 3440 - DNA, 261 bp, synthetic construct
  source 1..261: mol_type = other DNA
gctgcgagccacggacttaaataattgagccttaaagaagaaattctttaagtggatgctctcaaactcagggaaacctaaatctagttatagacaaggcaatcctgagccaagccgaagtagtaattagtaagttaacaatagatgacttacaactaatcggaaggtgcagagactcgacgggagctaccctaacgtcaagacgagggtaaagagagagtccaattctcaaagccaatacacaaacacaacttatatact

SEQ ID NO: 3441 - DNA, 271 bp, synthetic construct
  source 1..271: mol_type = other DNA
gctgcgagccacggacttaaataattgagccttaaagaagaaattctttaagtggatgctctcaaactcagggaaacctaaatctagttatagacaaggcaatcctgagccaagccgaagtagtaattagtaagttaacaatagatgacttacaactaatcggaaggtgcagagactcgacgggagctaccctaacgtcaagacgagggtaaagagagagtccaattctcaaagccaatacacaaacacaagagtataagtataatttcag

SEQ ID NO: 3442 - DNA, 281 bp, synthetic construct
  source 1..281: mol_type = other DNA
gctgcgagccacggacttaaataattgagccttaaagaagaaattctttaagtggatgctctcaaactcagggaaacctaaatctagttatagacaaggcaatcctgagccaagccgaagtagtaattagtaagttaacaatagatgacttacaactaatcggaaggtgcagagactcgacgggagctaccctaacgtcaagacgagggtaaagagagagtccaattctcaaagccaatacacaaacacaagtcatatactgagtataagtataatttcag

SEQ ID NO: 3443 - DNA, 261 bp, synthetic construct
  source 1..261: mol_type = other DNA
gctgcgagccacggacttaaataattgagccttaaagaagaaattctttaagtggatgctctcaaactcagggaaacctaaatctagttatagacaaggcaatcctgagccaagccgaagtagtaattagtaagttaacaatagatgacttacaactaatcggaaggtgcagagactcgacgggagctaccctaacgtcaagacgagggtaaagagagagtccaattctcaaagccaataaacaaaaacaagctgacgcta

SEQ ID NO: 3444 - DNA, 271 bp, synthetic construct
  source 1..271: mol_type = other DNA
gctgcgagccacggacttaaataattgagccttaaagaagaaattctttaagtggatgctctcaaactcagggaaacctaaatctagttatagacaaggcaatcctgagccaagccgaagtagtaattagtaagttaacaatagatgacttacaactaatcggaaggtgcagagactcgacgggagctaccctaacgtcaagacgagggtaaagagagagtccaattctcaaagccaataaacaaaaacaagctgacgctagtatgagtat

SEQ ID NO: 3445 - DNA, 281 bp, synthetic construct
  source 1..281: mol_type = other DNA
gctgcgagccacggacttaaataattgagccttaaagaagaaattctttaagtggatgctctcaaactcagggaaacctaaatctagttatagacaaggcaatcctgagccaagccgaagtagtaattagtaagttaacaatagatgacttacaactaatcggaaggtgcagagactcgacgggagctaccctaacgtcaagacgagggtaaagagagagtccaattctcaaagccaataaacaaaaacaagctgacgctagtatgagtatagcttcacac

SEQ ID NO: 3446 - DNA, 261 bp, synthetic construct
  source 1..261: mol_type = other DNA
gctgcgagccacggacttaaataattgagccttaaagaagaaattctttaagtggatgctctcaaactcagggaaacctaaatctagttatagacaaggcaatcctgagccaagccgaagtagtaattagtaagttaacaatagatgacttacaactaatcggaaggtgcagagactcgacgggagctaccctaacgtcaagacgagggtaaagagagagtccaattctcaaagccaataaacaaaaacaagctcgcaccg

SEQ ID NO: 3447 - DNA, 271 bp, synthetic construct
  source 1..271: mol_type = other DNA
gctgcgagccacggacttaaataattgagccttaaagaagaaattctttaagtggatgctctcaaactcagggaaacctaaatctagttatagacaaggcaatcctgagccaagccgaagtagtaattagtaagttaacaatagatgacttacaactaatcggaaggtgcagagactcgacgggagctaccctaacgtcaagacgagggtaaagagagagtccaattctcaaagccaataaacaaaaacaagctcgcactgggtcggagcg

SEQ ID NO: 3448 - DNA, 281 bp, synthetic construct
  source 1..281: mol_type = other DNA
gctgcgagccacggacttaaataattgagccttaaagaagaaattctttaagtggatgctctcaaactcagggaaacctaaatctagttatagacaaggcaatcctgagccaagccgaagtagtaattagtaagttaacaatagatgacttacaactaatcggaaggtgcagagactcgacgggagctaccctaacgtcaagacgagggtaaagagagagtccaattctcaaagccaataaacaaaaacaagctcgcactggccggaagctcgtcggagcg

SEQ ID NO: 3449 - DNA, 210 bp, synthetic construct
  source 1..210: mol_type = other DNA
gctgcgagccacggacttaaataattgagccttaaagaagaaattctttaagtggatgctctcaaactcagggaaacctaaatctagttatagacaaggcaatcctgagccaagccgaagtagtaattagtaagttaacaatagatgacttacaactaatcggaaggtgcagagactcgacgggagctaccctaacgtccacaaacacaa

SEQ ID NO: 3450 - DNA, 220 bp, synthetic construct
  source 1..220: mol_type = other DNA
gctgcgagccacggacttaaataattgagccttaaagaagaaattctttaagtggatgctctcaaactcagggaaacctaaatctagttatagacaaggcaatcctgagccaagccgaagtagtaattagtaagttaacaatagatgacttacaactaatcggaaggtgcagagactcgacgggagctaccctaacgtccacaaacacaacttatatact

SEQ ID NO: 3451 - DNA, 230 bp, synthetic construct
  source 1..230: mol_type = other DNA
gctgcgagccacggacttaaataattgagccttaaagaagaaattctttaagtggatgctctcaaactcagggaaacctaaatctagttatagacaaggcaatcctgagccaagccgaagtagtaattagtaagttaacaatagatgacttacaactaatcggaaggtgcagagactcgacgggagctaccctaacgtccacaaacacaagagtataagtataatttcag

SEQ ID NO: 3452 - DNA, 240 bp, synthetic construct
  source 1..240: mol_type = other DNA
gctgcgagccacggacttaaataattgagccttaaagaagaaattctttaagtggatgctctcaaactcagggaaacctaaatctagttatagacaaggcaatcctgagccaagccgaagtagtaattagtaagttaacaatagatgacttacaactaatcggaaggtgcagagactcgacgggagctaccctaacgtccacaaacacaagtcatatactgagtataagtataatttcag

SEQ ID NO: 3453 - DNA, 220 bp, synthetic construct
  source 1..220: mol_type = other DNA
gctgcgagccacggacttaaataattgagccttaaagaagaaattctttaagtggatgctctcaaactcagggaaacctaaatctagttatagacaaggcaatcctgagccaagccgaagtagtaattagtaagttaacaatagatgacttacaactaatcggaaggtgcagagactcgacgggagctaccctaacgtcaacaaaaacaagctgacgcta

SEQ ID NO: 3454 - DNA, 230 bp, synthetic construct
  source 1..230: mol_type = other DNA
gctgcgagccacggacttaaataattgagccttaaagaagaaattctttaagtggatgctctcaaactcagggaaacctaaatctagttatagacaaggcaatcctgagccaagccgaagtagtaattagtaagttaacaatagatgacttacaactaatcggaaggtgcagagactcgacgggagctaccctaacgtcaacaaaaacaagctgacgctagtatgagtat

SEQ ID NO: 3455 - DNA, 240 bp, synthetic construct
  source 1..240: mol_type = other DNA
gctgcgagccacggacttaaataattgagccttaaagaagaaattctttaagtggatgctctcaaactcagggaaacctaaatctagttatagacaaggcaatcctgagccaagccgaagtagtaattagtaagttaacaatagatgacttacaactaatcggaaggtgcagagactcgacgggagctaccctaacgtcaacaaaaacaagctgacgctagtatgagtatagcttcacac

SEQ ID NO: 3456 - DNA, 220 bp, synthetic construct
  source 1..220: mol_type = other DNA
gctgcgagccacggacttaaataattgagccttaaagaagaaattctttaagtggatgctctcaaactcagggaaacctaaatctagttatagacaaggcaatcctgagccaagccgaagtagtaattagtaagttaacaatagatgacttacaactaatcggaaggtgcagagactcgacgggagctaccctaacgtcaacaaaaacaagctcgcaccg

SEQ ID NO: 3457 - DNA, 230 bp, synthetic construct
  source 1..230: mol_type = other DNA
gctgcgagccacggacttaaataattgagccttaaagaagaaattctttaagtggatgctctcaaactcagggaaacctaaatctagttatagacaaggcaatcctgagccaagccgaagtagtaattagtaagttaacaatagatgacttacaactaatcggaaggtgcagagactcgacgggagctaccctaacgtcaacaaaaacaagctcgcactgggtcggagcg

SEQ ID NO: 3458 - DNA, 240 bp, synthetic construct
  source 1..240: mol_type = other DNA
gctgcgagccacggacttaaataattgagccttaaagaagaaattctttaagtggatgctctcaaactcagggaaacctaaatctagttatagacaaggcaatcctgagccaagccgaagtagtaattagtaagttaacaatagatgacttacaactaatcggaaggtgcagagactcgacgggagctaccctaacgtcaacaaaaacaagctcgcactggccggaagctcgtcggagcg

SEQ ID NO: 3459 - DNA, 172 bp, synthetic construct
  source 1..172: mol_type = other DNA
acggacttaaataattgagccttaaagaagaaattctttaagtggatgctctcaaactcagggaaacctaaatctagttatagacaaggcaatcctgagccaagccgaagtagtaattagtaagttaacaacacaaacacaagtcatatactgagtataagtataatttcag

SEQ ID NO: 3460 - DNA, 271 bp, synthetic construct
  source 1..271: mol_type = other DNA
acggacttaaataattgagccttaaagaagaaattctttaagtggatgctctcaaactcagggaaacctaaatctagttatagacaaggcaatcctgagccaagccgaagtagtaattagtaagttaacaatagatgacttacaactaatcggaaggtgcagagactcgacgggagctaccctaacgtcaagacgagggtaaagagagagtccaattctcaaagccaatacacaaacacaagtcatatactgagtataagtataatttcag

SEQ ID NO: 3461 - DNA, 281 bp, synthetic construct
  source 1..281: mol_type = other DNA
ctgtttaatcacggacttaaataattgagccttaaagaagaaattctttaagtggatgctctcaaactcagggaaacctaaatctagttatagacaaggcaatcctgagccaagccgaagtagtaattagtaagttaacaatagatgacttacaactaatcggaaggtgcagagactcgacgggagctaccctaacgtcaagacgagggtaaagagagagtccaattctcaaagccaatacacaaacacaagtcatatactgagtataagtataatttcag

SEQ ID NO: 3462 - DNA, 291 bp, synthetic construct
  source 1..291: mol_type = other DNA
cgtaatttatattgtgaatcacggacttaaataattgagccttaaagaagaaattctttaagtggatgctctcaaactcagggaaacctaaatctagttatagacaaggcaatcctgagccaagccgaagtagtaattagtaagttaacaatagatgacttacaactaatcggaaggtgcagagactcgacgggagctaccctaacgtcaagacgagggtaaagagagagtccaattctcaaagccaatacacaaacacaagtcatatactgagtataagtataatttcag

SEQ ID NO: 3463 - DNA, 281 bp, synthetic construct
  source 1..281: mol_type = other DNA
gctatgatccacggacttaaataattgagccttaaagaagaaattctttaagtggatgctctcaaactcagggaaacctaaatctagttatagacaaggcaatcctgagccaagccgaagtagtaattagtaagttaacaatagatgacttacaactaatcggaaggtgcagagactcgacgggagctaccctaacgtcaagacgagggtaaagagagagtccaattctcaaagccaatacacaaacacaagtcatatactgagtataagtataatttcag

SEQ ID NO: 3464 - DNA, 291 bp, synthetic construct
  source 1..291: mol_type = other DNA
cggatattatgctgcgatccacggacttaaataattgagccttaaagaagaaattctttaagtggatgctctcaaactcagggaaacctaaatctagttatagacaaggcaatcctgagccaagccgaagtagtaattagtaagttaacaatagatgacttacaactaatcggaaggtgcagagactcgacgggagctaccctaacgtcaagacgagggtaaagagagagtccaattctcaaagccaatacacaaacacaagtcatatactgagtataagtataatttcag

SEQ ID NO: 3465 - DNA, 291 bp, synthetic construct
  source 1..291: mol_type = other DNA
cggtaggcgcgctgcgagccacggacttaaataattgagccttaaagaagaaattctttaagtggatgctctcaaactcagggaaacctaaatctagttatagacaaggcaatcctgagccaagccgaagtagtaattagtaagttaacaatagatgacttacaactaatcggaaggtgcagagactcgacgggagctaccctaacgtcaagacgagggtaaagagagagtccaattctcaaagccaatacacaaacacaagtcatatactgagtataagtataatttcag

SEQ ID NO: 3466 - DNA, 230 bp, synthetic construct
  source 1..230: mol_type = other DNA
acggacttaaataattgagccttaaagaagaaattctttaagtggatgctctcaaactcagggaaacctaaatctagttatagacaaggcaatcctgagccaagccgaagtagtaattagtaagttaacaatagatgacttacaactaatcggaaggtgcagagactcgacgggagctaccctaacgtccacaaacacaagtcatatactgagtataagtataatttcag

SEQ ID NO: 3467 - DNA, 240 bp, synthetic construct
  source 1..240: mol_type = other DNA
ctgtttaatcacggacttaaataattgagccttaaagaagaaattctttaagtggatgctctcaaactcagggaaacctaaatctagttatagacaaggcaatcctgagccaagccgaagtagtaattagtaagttaacaatagatgacttacaactaatcggaaggtgcagagactcgacgggagctaccctaacgtccacaaacacaagtcatatactgagtataagtataatttcag

SEQ ID NO: 3468 - DNA, 250 bp, synthetic construct
  source 1..250: mol_type = other DNA
cgtaatttatattgtgaatcacggacttaaataattgagccttaaagaagaaattctttaagtggatgctctcaaactcagggaaacctaaatctagttatagacaaggcaatcctgagccaagccgaagtagtaattagtaagttaacaatagatgacttacaactaatcggaaggtgcagagactcgacgggagctaccctaacgtccacaaacacaagtcatatactgagtataagtataatttcag

SEQ ID NO: 3469 - DNA, 240 bp, synthetic construct
  source 1..240: mol_type = other DNA
gctatgatccacggacttaaataattgagccttaaagaagaaattctttaagtggatgctctcaaactcagggaaacctaaatctagttatagacaaggcaatcctgagccaagccgaagtagtaattagtaagttaacaatagatgacttacaactaatcggaaggtgcagagactcgacgggagctaccctaacgtccacaaacacaagtcatatactgagtataagtataatttcag

SEQ ID NO: 3470 - DNA, 250 bp, synthetic construct
  source 1..250: mol_type = other DNA
cggatattatgctgcgatccacggacttaaataattgagccttaaagaagaaattctttaagtggatgctctcaaactcagggaaacctaaatctagttatagacaaggcaatcctgagccaagccgaagtagtaattagtaagttaacaatagatgacttacaactaatcggaaggtgcagagactcgacgggagctaccctaacgtccacaaacacaagtcatatactgagtataagtataatttcag

SEQ ID NO: 3471 - DNA, 250 bp, synthetic construct
  source 1..250: mol_type = other DNA
cggtaggcgcgctgcgagccacggacttaaataattgagccttaaagaagaaattctttaagtggatgctctcaaactcagggaaacctaaatctagttatagacaaggcaatcctgagccaagccgaagtagtaattagtaagttaacaatagatgacttacaactaatcggaaggtgcagagactcgacgggagctaccctaacgtccacaaacacaagtcatatactgagtataagtataatttcag

SEQ ID NO: 3472 - DNA, 162 bp, synthetic construct; identical to SEQ ID NO: 3409
  source 1..162: mol_type = other DNA

SEQ ID NO: 3473 - DNA, 172 bp, synthetic construct; identical to SEQ ID NO: 3410
  source 1..172: mol_type = other DNA

SEQ ID NO: 3474 - DNA, 182 bp, synthetic construct; identical to SEQ ID NO: 3411
  source 1..182: mol_type = other DNA

SEQ ID NO: 3475 - DNA, 192 bp, synthetic construct; identical to SEQ ID NO: 3412
  source 1..192: mol_type = other DNA

SEQ ID NO: 3476 - DNA, 202 bp, synthetic construct; identical to SEQ ID NO: 3413
  source 1..202: mol_type = other DNA

SEQ ID NO: 3477 - DNA, 162 bp, synthetic construct; identical to SEQ ID NO: 3414
  source 1..162: mol_type = other DNA

SEQ ID NO: 3478 - DNA, 172 bp, synthetic construct; identical to SEQ ID NO: 3415
  source 1..172: mol_type = other DNA

SEQ ID NO: 3479 - DNA, 182 bp, synthetic construct; identical to SEQ ID NO: 3416
  source 1..182: mol_type = other DNA

SEQ ID NO: 3480 - DNA, 192 bp, synthetic construct; identical to SEQ ID NO: 3417
  source 1..192: mol_type = other DNA

SEQ ID NO: 3481 - DNA, 202 bp, synthetic construct; identical to SEQ ID NO: 3418
  source 1..202: mol_type = other DNA

SEQ ID NO: 3482 - DNA, 162 bp, synthetic construct; identical to SEQ ID NO: 3419
  source 1..162: mol_type = other DNA

SEQ ID NO: 3483 - DNA, 172 bp, synthetic construct; identical to SEQ ID NO: 3420
  source 1..172: mol_type = other DNA

SEQ ID NO: 3484 - DNA, 182 bp, synthetic construct; identical to SEQ ID NO: 3411
  source 1..182: mol_type = other DNA

SEQ ID NO: 3485 - DNA, 182 bp, synthetic construct; identical to SEQ ID NO: 3411
  source 1..182: mol_type = other DNA

SEQ ID NO: 3486 - DNA, 182 bp, synthetic construct; identical to SEQ ID NO: 3411
  source 1..182: mol_type = other DNA

SEQ ID NO: 3487 - DNA, 182 bp, synthetic construct; identical to SEQ ID NO: 3411
  source 1..182: mol_type = other DNA

SEQ ID NO: 3488 - DNA, 182 bp, synthetic construct; identical to SEQ ID NO: 3425
  source 1..182: mol_type = other DNA

SEQ ID NO: 3489 - DNA, 182 bp, synthetic construct; identical to SEQ ID NO: 3426
  source 1..182: mol_type = other DNA

SEQ ID NO: 3490 - DNA, 182 bp, synthetic construct; identical to SEQ ID NO: 3427
  source 1..182: mol_type = other DNA

SEQ ID NO: 3491 - DNA, 182 bp, synthetic construct; identical to SEQ ID NO: 3428
  source 1..182: mol_type = other DNA

SEQ ID NO: 3492 - DNA, 192 bp, synthetic construct; identical to SEQ ID NO: 3429
  source 1..192: mol_type = other DNA

SEQ ID NO: 3493 - DNA, 182 bp, synthetic construct; identical to SEQ ID NO: 3430
  source 1..182: mol_type = other DNA

SEQ ID NO: 3494 - DNA, 192 bp, synthetic construct; identical to SEQ ID NO: 3431
  source 1..192: mol_type = other DNA

SEQ ID NO: 3495 - DNA, 192 bp, synthetic construct; identical to SEQ ID NO: 3432
  source 1..192: mol_type = other DNA

SEQ ID NO: 3496 - DNA, 215 bp, synthetic construct; identical to SEQ ID NO: 3433
  source 1..215: mol_type = other DNA

SEQ ID NO: 3497 - DNA, 215 bp, synthetic construct; identical to SEQ ID NO: 3434
  source 1..215: mol_type = other DNA

SEQ ID NO: 3498 - DNA, 215 bp, synthetic construct; identical to SEQ ID NO: 3435
  source 1..215: mol_type = other DNA

SEQ ID NO: 3499 - DNA, 152 bp, synthetic construct; identical to SEQ ID NO: 3436
  source 1..152: mol_type = other DNA

SEQ ID NO: 3500 - DNA, 157 bp, synthetic construct; identical to SEQ ID NO: 3437
  source 1..157: mol_type = other DNA

SEQ ID NO: 3501 - DNA, 182 bp, synthetic construct; identical to SEQ ID NO: 3438
  source 1..182: mol_type = other DNA

SEQ ID NO: 3502 - DNA, 251 bp, synthetic construct; identical to SEQ ID NO: 3439
  source 1..251: mol_type = other DNA

SEQ ID NO: 3503 - DNA, 261 bp, synthetic construct; identical to SEQ ID NO: 3440
  source 1..261: mol_type = other DNA

SEQ ID NO: 3504 - DNA, 271 bp, synthetic construct; identical to SEQ ID NO: 3441
  source 1..271: mol_type = other DNA

SEQ ID NO: 3505 - DNA, 281 bp, synthetic construct; identical to SEQ ID NO: 3442
  source 1..281: mol_type = other DNA

SEQ ID NO: 3506 - DNA, 261 bp, synthetic construct; identical to SEQ ID NO: 3443
  source 1..261: mol_type = other DNA

SEQ ID NO: 3507 - DNA, 271 bp, synthetic construct; identical to SEQ ID NO: 3444
  source 1..271: mol_type = other DNA

SEQ ID NO: 3508 - DNA, 281 bp, synthetic construct; identical to SEQ ID NO: 3445
  source 1..281: mol_type = other DNA

SEQ ID NO: 3509 - DNA, 261 bp, synthetic construct; identical to SEQ ID NO: 3446
  source 1..261: mol_type = other DNA

SEQ ID NO: 3510 - DNA, 271 bp, synthetic construct; identical to SEQ ID NO: 3447
  source 1..271: mol_type = other DNA

SEQ ID NO: 3511 - DNA, 281 bp, synthetic construct; identical to SEQ ID NO: 3448
  source 1..281: mol_type = other DNA

SEQ ID NO: 3512 - DNA, 210 bp, synthetic construct; identical to SEQ ID NO: 3449
  source 1..210: mol_type = other DNA

SEQ ID NO: 3513 - DNA, 220 bp, synthetic construct; identical to SEQ ID NO: 3450
  source 1..220: mol_type = other DNA

SEQ ID NO: 3514 - DNA, 230 bp, synthetic construct; identical to SEQ ID NO: 3451
  source 1..230: mol_type = other DNA

SEQ ID NO: 3515 - DNA, 240 bp, synthetic construct; identical to SEQ ID NO: 3452
  source 1..240: mol_type = other DNA

SEQ ID NO: 3516 - DNA, 220 bp, synthetic construct; identical to SEQ ID NO: 3453
  source 1..220: mol_type = other DNA

SEQ ID NO: 3517 - DNA, 230 bp, synthetic construct; identical to SEQ ID NO: 3454
  source 1..230: mol_type = other DNA

SEQ ID NO: 3518 - DNA, 240 bp, synthetic construct; identical to SEQ ID NO: 3455
  source 1..240: mol_type = other DNA

SEQ ID NO: 3519 - DNA, 220 bp, synthetic construct; identical to SEQ ID NO: 3456
  source 1..220: mol_type = other DNA

SEQ ID NO: 3520 - DNA, 230 bp, synthetic construct; identical to SEQ ID NO: 3457
  source 1..230: mol_type = other DNA

SEQ ID NO: 3521 - DNA, 240 bp, synthetic construct; identical to SEQ ID NO: 3458
  source 1..240: mol_type = other DNA

SEQ ID NO: 3522 - DNA, 172 bp, synthetic construct; identical to SEQ ID NO: 3459
  source 1..172: mol_type = other DNA

SEQ ID NO: 3523 - DNA, 271 bp, synthetic construct; identical to SEQ ID NO: 3460
  source 1..271: mol_type = other DNA

SEQ ID NO: 3524 - DNA, 281 bp, synthetic construct; identical to SEQ ID NO: 3461
  source 1..281: mol_type = other DNA

SEQ ID NO: 3525 - DNA, 291 bp, synthetic construct; identical to SEQ ID NO: 3462
  source 1..291: mol_type = other DNA

SEQ ID NO: 3526 - DNA, 281 bp, synthetic construct; identical to SEQ ID NO: 3463
  source 1..281: mol_type = other DNA

SEQ ID NO: 3527 - DNA, 291 bp, synthetic construct; identical to SEQ ID NO: 3464
  source 1..291: mol_type = other DNA

SEQ ID NO: 3528 - DNA, 291 bp, synthetic construct; identical to SEQ ID NO: 3465
  source 1..291: mol_type = other DNA

SEQ ID NO: 3529 - DNA, 230 bp, synthetic construct; identical to SEQ ID NO: 3466
  source 1..230: mol_type = other DNA

SEQ ID NO: 3530 - DNA, 240 bp, synthetic construct; identical to SEQ ID NO: 3467
  source 1..240: mol_type = other DNA

SEQ ID NO: 3531 - DNA, 250 bp, synthetic construct; identical to SEQ ID NO: 3468
  source 1..250: mol_type = other DNA

SEQ ID NO: 3532 - DNA, 240 bp, synthetic construct; identical to SEQ ID NO: 3469
  source 1..240: mol_type = other DNA

SEQ ID NO: 3533 - DNA, 250 bp, synthetic construct; identical to SEQ ID NO: 3470
  source 1..250: mol_type = other DNA

SEQ ID NO: 3534 - DNA, 250 bp, synthetic construct; identical to SEQ ID NO: 3471
  source 1..250: mol_type = other DNA

SEQ ID NO: 3535 - DNA, 1137 bp, synthetic construct
  source 1..1137: mol_type = other DNA
atgctgctgctggtcacatctctgctgctgtgcgagctgccccatcctgcctttctgctgatccccgacatccagatgacccagaccacaagcagcctgtctgccagcctgggcgatagagtgaccatcagctgtagagccagccaggacatcagcaagtacctgaactggtatcagcaaaagcccgacggcaccgtgaagctgctgatctaccacaccagcagactgcacagcggcgtgccaagcagattttctggcagcggctctggcaccgactacagcctgacaatcagcaacctggaacaagaggatatcgctacctacttctgccagcaaggcaacaccctgccttacacctttggcggaggcaccaagctggaaatcaccggctctacaagcggcagcggcaaacctggatctggcgagggatctaccaagggcgaagtgaaactgcaagagtctggccctggactggtggccccatctcagtctctgagcgtgacctgtacagtcagcggagtgtccctgcctgattacggcgtgtcctggatcagacagcctcctcggaaaggcctggaatggctgggagtgatctggggcagcgagacaacctactacaacagcgccctgaagtcccggctgaccatcatcaaggacaactccaagagccaggtgttcctgaagatgaacagcctgcagaccgacgacaccgccatctactattgcgccaagcactactactacggcggcagctacgccatggattattggggccagggcaccagcgtgaccgtttcttctgccgccgctatcgaagtgatgtaccctcctccttacctggacaacgagaagtccaacggcaccatcatccacgtgaagggcaagcacctgtgtccttctccactgttccccggacctagcaagcctttctgggtgctcgttgttgttggcggcgtgctggcctgttacagcctgctggttaccgtggccttcatcatcttttgggtcaagagaggccggaagaaacttctttatatattcaagcagccctttatgcgacccgttcagactacccaagaggaagatggatgcagttgccgctttccagaagaggaggagggcgggtgcgaactgtaa

SEQ ID NO: 3536 - DNA, 1134 bp, synthetic construct
  source 1..1134: mol_type = other DNA
atgctgctgctggtcacatctctgctgctgtgcgagctgccccatcctgcctttctgctgatccccgacatccagatgacccagaccacaagcagcctgtctgccagcctgggcgatagagtgaccatcagctgtagagccagccaggacatcagcaagtacctgaactggtatcagcaaaagcccgacggcaccgtgaagctgctgatctaccacaccagcagactgcacagcggcgtgccaagcagattttctggcagcggctctggcaccgactacagcctgacaatcagcaacctggaacaagaggatatcgctacctacttctgccagcaaggcaacaccctgccttacacctttggcggaggcaccaagctggaaatcaccggctctacaagcggcagcggcaaacctggatctggcgagggatctaccaagggcgaagtgaaactgcaagagtctggccctggactggtggccccatctcagtctctgagcgtgacctgtacagtcagcggagtgtccctgcctgattacggcgtgtcctggatcagacagcctcctcggaaaggcctggaatggctgggagtgatctggggcagcgagacaacctactacaacagcgccctgaagtcccggctgaccatcatcaaggacaactccaagagccaggtgttcctgaagatgaacagcctgcagaccgacgacaccgccatctactattgcgccaagcactactactacggcggcagctacgccatggattattggggccagggcaccagcgtgaccgtttcttctgccgccgctatcgaagtgatgtaccctcctccttacctggacaacgagaagtccaacggcaccatcatccacgtgaagggcaagcacctgtgtccttctccactgttccccggacctagcaagcctttctgggtgctcgttgttgttggcggcgtgctggcctgttacagcctgctggttaccgtggccttcatcatcttttgggtccgaagcaagcggagccggctgctgcactccgactacatgaacatgacccctagacggcccggaccaaccagaaagcactaccagccttacgctcctcctagagacttcgccgcctaccggtcctaa

SEQ ID NO: 3537 - DNA, 1470 bp, synthetic construct
  source 1..1470: mol_type = other DNA
atgctgctgctggtcacatctctgctgctgtgcgagctgccccatcctgcctttctgctgatccccgacatccagatgacccagaccacaagcagcctgtctgccagcctgggcgatagagtgaccatcagctgtagagccagccaggacatcagcaagtacctgaactggtatcagcaaaagcccgacggcaccgtgaagctgctgatctaccacaccagcagactgcacagcggcgtgccaagcagattttctggcagcggctctggcaccgactacagcctgacaatcagcaacctggaacaagaggatatcgctacctacttctgccagcaaggcaacaccctgccttacacctttggcggaggcaccaagctggaaatcaccggctctacaagcggcagcggcaaacctggatctggcgagggatctaccaagggcgaagtgaaactgcaagagtctggccctggactggtggccccatctcagtctctgagcgtgacctgtacagtcagcggagtgtccctgcctgattacggcgtgtcctggatcagacagcctcctcggaaaggcctggaatggctgggagtgatctggggcagcgagacaacctactacaacagcgccctgaagtcccggctgaccatcatcaaggacaactccaagagccaggtgttcctgaagatgaacagcctgcagaccgacgacaccgccatctactattgcgccaagcactactactacggcggcagctacgccatggattattggggccagggcaccagcgtgaccgtttcttctgccgccgctatcgaagtgatgtaccctcctccttacctggacaacgagaagtccaacggcaccatcatccacgtgaagggcaagcacctgtgtccttctccactgttccccggacctagcaagcctttctgggtgctcgttgttgttggcggcgtgctggcctgttacagcctgctggttaccgtggccttcatcatcttttgggtccgaagcaagcggagccggctgctgcactccgactacatgaacatgacccctagacggcccggaccaaccagaaagcactaccagccttacgctcctcctagagacttcgccgcctaccggtccagagtgaagttcagcagatccgccgatgctcccgcctatcagcagggccaaaaccagctgtacaacgagctgaacctggggagaagagaagagtacgacgtgctggacaagcggagaggcagagatcctgaaatgggcggcaagcccagacggaagaatcctcaagagggcctgtataatgagctgcagaaagacaagatggccgaggcctacagcgagatcggaatgaagggcgagcgcagaagaggcaagggacacgatggactgtaccagggactgagcaccgccaccaaggatacctatgacgccctgcacatgcaggccctgcctccaagataa

SEQ ID NO: 3538 - DNA, 1347 bp, synthetic construct
  source 1..1347: mol_type = other DNA
atgctgctgctggtcacatctctgctgctgtgcgagctgccccatcctgcctttctgctgatccccgacatccagatgacccagaccacaagcagcctgtctgccagcctgggcgatagagtgaccatcagctgtagagccagccaggacatcagcaagtacctgaactggtatcagcaaaagcccgacggcaccgtgaagctgctgatctaccacaccagcagactgcacagcggcgtgccaagcagattttctggcagcggctctggcaccgactacagcctgacaatcagcaacctggaacaagaggatatcgctacctacttctgccagcaaggcaacaccctgccttacacctttggcggaggcaccaagctggaaatcaccggctctacaagcggcagcggcaaacctggatctggcgagggatctaccaagggcgaagtgaaactgcaagagtctggccctggactggtggccccatctcagtctctgagcgtgacctgtacagtcagcggagtgtccctgcctgattacggcgtgtcctggatcagacagcctcctcggaaaggcctggaatggctgggagtgatctggggcagcgagacaacctactacaacagcgccctgaagtcccggctgaccatcatcaaggacaactccaagagccaggtgttcctgaagatgaacagcctgcagaccgacgacaccgccatctactattgcgccaagcactactactacggcggcagctacgccatggattattggggccagggcaccagcgtgaccgtttcttctgccgccgctatcgaagtgatgtaccctcctccttacctggacaacgagaagtccaacggcaccatcatccacgtgaagggcaagcacctgtgtccttctccactgttccccggacctagcaagcctttctgggtgctcgttgttgttggcggcgtgctggcctgttacagcctgctggttaccgtggccttcatcatcttttgggtcagagtgaagttcagcagatccgccgatgctcccgcctatcagcagggccaaaaccagctgtacaacgagctgaacctggggagaagagaagagtacgacgtgctggacaagcggagaggcagagatcctgaaatgggcggcaagcccagacggaagaatcctcaagagggcctgtataatgagctgcagaaagacaagatggccgaggcctacagcgagatcggaatgaagggcgagcgcagaagaggcaagggacacgatggactgtaccagggactgagcaccgccaccaaggatacctatgacgccctgcacatgcaggccctgcctccaagataa

SEQ ID NO: 3539 - DNA, 1461 bp, synthetic construct
  source 1..1461: mol_type = other DNA
atggctctcccggtcacagcccttctcctgcccctggcactcttgctgcatgcggcacgacccgacatccagatgacccagaccacaagcagcctgtctgccagcctgggcgatagagtgaccatcagctgtagagccagccaggacatcagcaagtacctgaactggtatcagcaaaagcccgacggcaccgtgaagctgctgatctaccacaccagcagactgcacagcggcgtgccaagcagattttctggcagcggctctggcaccgactacagcctgacaatcagcaacctggaacaagaggatatcgctacctacttctgccagcaaggcaacaccctgccttacacctttggcggaggcaccaagctggaaatcaccggtggaggtggttctggcggagggggatctggtggaggcggttcagaagtgaaactgcaagagtctggccctggactggtggccccatctcagtctctgagcgtgacctgtacagtcagcggagtgtccctgcctgattacggcgtgtcctggatcagacagcctcctcggaaaggcctggaatggctgggagtgatctggggcagcgagacaacctactacaacagcgccctgaagtcccggctgaccatcatcaaggacaactccaagagccaggtgttcctgaagatgaacagcctgcagaccgacgacaccgccatctactattgcgccaagcactactactacggcggcagctacgccatggattattggggccagggcaccagcgtgaccgtttcttctaccacaacgcccgccccgcgaccgcctactcccgctcccacaattgcatcacaacccctgtctttgagacccgaagcttgtcgaccagctgccggtggcgcggttcacacgcgggggctcgatttcgcctgtgatatatatatatgggccccattggctggaacatgcggagtattgcttctgagcctggtgattaccctctactgtaagagaggccggaagaaacttctttatatattcaagcagccctttatgcgacccgttcagactacccaagaggaagatggatgcagttgccgctttccagaagaggaggagggcgggtgcgaactgagagtgaagttcagcagatccgccgatgctcccgcctatcagcagggccaaaaccagctgtacaacgagctgaacctggggagaagagaagagtacgacgtgctggacaagcggagaggcagagatcctgaaatgggcggcaagcccagacggaagaatcctcaagagggcctgtataatgagctgcagaaagacaagatggccgaggcctacagcgagatcggaatgaagggcgagcgcagaagaggcaagggacacgatggactgtaccagggactgagcaccgccaccaaggatacctatgacgccctgcacatgcaggccctgcctccaagataa

SEQ ID NO: 3540 - DNA, 1461 bp, synthetic construct
  source 1..1461: mol_type = other DNA
atggctctcccggtcacagcccttctcctgcccctggcactcttgctgcatgcggcacgacccgacatccagatgacccagaccacaagcagcctgtctgccagcctgggcgatagagtgaccatcagctgtagagccagccaggacatcagcaagtacctgaactggtatcagcaaaagcccgacggcaccgtgaagctgctgatctaccacaccagcagactgcacagcggcgtgccaagcagattttctggcagcggctctggcaccgactacagcctgacaatcagcaacctggaacaagaggatatcgctacctacttctgccagcaaggcaacaccctgccttacacctttggcggaggcaccaagctggaaatcaccggtggaggtggttctggcggagggggatctggtggaggcggttcagaagtgaaactgcaagagtctggccctggactggtggccccatctcagtctctgagcgtgacctgtacagtcagcggagtgtccctgcctgattacggcgtgtcctggatcagacagcctcctcggaaaggcctggaatggctgggagtgatctggggcagcgagacaacctactacaacagcgccctgaagtcccggctgaccatcatcaaggacaactccaagagccaggtgttcctgaagatgaacagcctgcagaccgacgacaccgccatctactattgcgccaagcactactactacggcggcagctacgccatggattattggggccagggcaccagcgtgaccgtttcttctaccacaacgcccgccccgcgaccgcctactcccgctcccacaattgcatcacaacccctgtctttgagacccgaagcttgtcgaccagctgccggtggcgcggttcacacgcgggggctcgatttcgcctgtgatatatatatatgggccccattggctggaacatgcggagtattgcttctgagcctggtgattaccctctactgtaagagaggccggaagaaacttctttatatattcaagcagccctttatgcgacccgttcagactacccaagaggaagatggatgcagttgccgctttccagaagaggaggagggcgggtgcgaactgagagtgaagttcagcagatccgccgatgctcccgcctataagcagggccaaaaccagctgtacaacgagctgaacctggggagaagagaagagtacgacgtgctggacaagcggagaggcagagatcctgaaatgggcggcaagcccagacggaagaatcctcaagagggcctgtataatgagctgcagaaagacaagatggccgaggcctacagcgagatcggaatgaagggcgagcgcagaagaggcaagggacacgatggactgtaccagggactgagcaccgccaccaaggatacctatgacgccctgcacatgcaggccctgcctccaagataa

SEQ ID NO: 3541 - DNA, 1452 bp, synthetic construct
  source 1..1452: mol_type = other DNA
atgctgctgctggtcacatctctgctgctgtgcgagctgccccatcctgcctttctgctgatcccccaggttcaactccagcagtctggtcccggcctcgttaaaccaagccagactttgtctcttacctgtgctatcagtggcgatagcgtgtctagtaattcagccgcatggaactggatccgacaatcaccgagtaggggacttgaatggctgggtagaacctattaccggtccaaatggtacaatgactatgcagtgtctgtaaaaagcaggatcacgatcaaccctgatacgtctaaaaaccagttttctctgcaacttaatagtgtgacccctgaagacaccgctgtgtattactgtgcacgggaggttaccggtgatcttgaagatgcttttgatatatggggccaaggtacgatggtcacggtgtctagtgggggaggcggcagcgacatacagatgacgcagagcccatccagtctctccgcgtctgttggtgacagagtgactattacatgtagggcgtctcagaccatttggtcttacctcaattggtatcaacagcgaccaggcaaagcaccgaacttgctcatttacgctgccagctcactccaaagtggtgtgccgtccagatttagtggtaggggcagtggcactgatttcactctgactatttcaagtcttcaagctgaggattttgccacatactactgccagcaaagttactcaatacctcagacttttggacaggggacaaaattggagattaaatccggaaccacaacgcccgccccgcgaccgcctactcccgctcccacaattgcatcacaacccctgtctttgagacccgaagcttgtcgaccagctgccggtggcgcggttcacacgcgggggctcgatttcgcctgtgatatatatatatgggccccattggctggaacatgcggagtattgcttctgagcctggtgattaccctctactgtaagagaggccggaagaaacttctttatatattcaagcagccctttatgcgacccgttcagactacccaagaggaagatggatgcagttgccgctttccagaagaggaggagggcgggtgcgaactgagagtgaagttcagcagatccgccgatgctcccgcctataagcagggccaaaaccagctgtacaacgagctgaacctggggagaagagaagagtacgacgtgctggacaagcggagaggcagagatcctgaaatgggcggcaagcccagacggaagaatcctcaagagggcctgtataatgagctgcagaaagacaagatggccgaggcctacagcgagatcggaatgaagggcgagcgcagaagaggcaagggacacgatggactgtaccagggactgagcaccgccaccaaggatacctatgacgccctgcacatgcaggccctgcctccaagataa

SEQ ID NO: 3542 - DNA, 2202 bp, synthetic construct
  source 1..2202: mol_type = other DNA
atgctgctgctggtcacatctctgctgctgtgcgagctgccccatcctgcctttctgctgatccccgacatccagatgacccagaccacaagcagcctgtctgccagcctgggcgatagagtgaccatcagctgtagagccagccaggacatcagcaagtacctgaactggtatcagcaaaagcccgacggcaccgtgaagctgctgatctaccacaccagcagactgcacagcggcgtgccaagcagattttctggcagcggctctggcaccgactacagcctgacaatcagcaacctggaacaagaggatatcgctacctacttctgccagcaaggcaacaccctgccttacacctttggcggaggcaccaagctggaaatcaccggcggcggaggatcccaggttcaactccagcagtctggtcccggcctcgttaaaccaagccagactttgtctcttacctgtgctatcagtggcgatagcgtgtctagtaattcagccgcatggaactggatccgacaatcaccgagtaggggacttgaatggctgggtagaacctattaccggtccaaatggtacaatgactatgcagtgtctgtaaaaagcaggatcacgatcaaccctgatacgtctaaaaaccagttttctctgcaacttaatagtgtgacccctgaagacaccgctgtgtattactgtgcacgggaggttaccggtgatcttgaagatgcttttgatatatggggccaaggtacgatggtcacggtgtctagtggctctacaagcggcagcggcaaacctggatctggcgagggatctaccaagggcgacatacagatgacgcagagcccatccagtctctccgcgtctgttggtgacagagtgactattacatgtagggcgtctcagaccatttggtcttacctcaattggtatcaacagcgaccaggcaaagcaccgaacttgctcatttacgctgccagctcactccaaagtggtgtgccgtccagatttagtggtaggggcagtggcactgatttcactctgactatttcaagtcttcaagctgaggattttgccacatactactgccagcaaagttactcaatacctcagacttttggacaggggacaaaattggagattaaagggggaggcggcagcgaagtgaaactgcaagagtctggccctggactggtggccccatctcagtctctgagcgtgacctgtacagtcagcggagtgtccctgcctgattacggcgtgtcctggatcagacagcctcctcggaaaggcctggaatggctgggagtgatctggggcagcgagacaacctactacaacagcgccctgaagtcccggctgaccatcatcaaggacaactccaagagccaggtgttcctgaagatgaacagcctgcagaccgacgacaccgccatctactattgcgccaagcactactactacggcggcagctacgccatggattattggggccagggcaccagcgtgaccgtttcttcttccggaaccacaacgcccgccccgcgaccgcctactcccgctcccacaattgcatcacaacccctgtctttgagacccgaagcttgtcgaccagctgccggtggcgcggttcacacgcgggggctcgatttcgcctgtgatatatatatatgggccccattggctggaacatgcggagtattgcttctgagcctggtgattaccctctactgtaagagaggccggaagaaacttctttatatattcaagcagccctttatgcgacccgttcagactacccaagaggaagatggatgcagttgccgctttccagaagaggaggagggcgggtgcgaactgagagtgaagttcagcagatccgccgatgctcccgcctataagcagggccaaaaccagctgtacaacgagctgaacctggggagaagagaagagtacgacgtgctggacaagcggagaggcagagatcctgaaatgggcggcaagcccagacggaagaatcctcaagagggcctgtataatgagctgcagaaagacaagatggccgaggcctacagcgagatcggaatgaagggcgagcgcagaagaggcaagggacacgatggactgtaccagggactgagcaccgccaccaaggatacctatgacgccctgcacatgcaggccctgcctccaagataa

SEQ ID NO: 3543 - DNA, 2262 bp, synthetic construct
  source 1..2262: mol_type = other DNA
atgctgctgctggtcacatctctgctgctgtgcgagctgccccatcctgcctttctgctgatcccccaggttcaactccagcagtctggtcccggcctcgttaaaccaagccagactttgtctcttacctgtgctatcagtggcgatagcgtgtctagtaattcagccgcatggaactggatccgacaatcaccgagtaggggacttgaatggctgggtagaacctattaccggtccaaatggtacaatgactatgcagtgtctgtaaaaagcaggatcacgatcaaccctgatacgtctaaaaaccagttttctctgcaacttaatagtgtgacccctgaagacaccgctgtgtattactgtgcacgggaggttaccggtgatcttgaagatgcttttgatatatggggccaaggtacgatggtcacggtgtctagtgggggaggcggcagcgacatacagatgacgcagagcccatccagtctctccgcgtctgttggtgacagagtgactattacatgtagggcgtctcagaccatttggtcttacctcaattggtatcaacagcgaccaggcaaagcaccgaacttgctcatttacgctgccagctcactccaaagtggtgtgccgtccagatttagtggtaggggcagtggcactgatttcactctgactatttcaagtcttcaagctgaggattttgccacatactactgccagcaaagttactcaatacctcagacttttggacaggggacaaaattggagattaaagggggaggcggatccggcggtggtggctccggcggtggtggttctggaggcggcggaagcggtgggggtggtagcgacatccagatgacccagaccacaagcagcctgtctgccagcctgggcgatagagtgaccatcagctgtagagccagccaggacatcagcaagtacctgaactggtatcagcaaaagcccgacggcaccgtgaagctgctgatctaccacaccagcagactgcacagcggcgtgccaagcagattttctggcagcggctctggcaccgactacagcctgacaatcagcaacctggaacaagaggatatcgctacctacttctgccagcaaggcaacaccctgccttacacctttggcggaggcaccaagctggaaatcaccggctctacaagcggcagcggcaaacctggatctggcgagggatctaccaagggcgaagtgaaactgcaagagtctggccctggactggtggccccatctcagtctctgagcgtgacctgtacagtcagcggagtgtccctgcctgattacggcgtgtcctggatcagacagcctcctcggaaaggcctggaatggctgggagtgatctggggcagcgagacaacctactacaacagcgccctgaagtcccggctgaccatcatcaaggacaactccaagagccaggtgttcctgaagatgaacagcctgcagaccgacgacaccgccatctactattgcgccaagcactactactacggcggcagctacgccatggattattggggccagggcaccagcgtgaccgtttcttcttccggaaccacaacgcccgccccgcgaccgcctactcccgctcccacaattgcatcacaacccctgtctttgagacccgaagcttgtcgaccagctgccggtggcgcggttcacacgcgggggctcgatttcgcctgtgatatatatatatgggccccattggctggaacatgcggagtattgcttctgagcctggtgattaccctctactgtaagagaggccggaagaaacttctttatatattcaagcagccctttatgcgacccgttcagactacccaagaggaagatggatgcagttgccgctttccagaagaggaggagggcgggtgcgaactgagagtgaagttcagcagatccgccgatgctcccgcctataagcagggccaaaaccagctgtacaacgagctgaacctggggagaagagaagagtacgacgtgctggacaagcggagaggcagagatcctgaaatgggcggcaagcccagacggaagaatcctcaagagggcctgtataatgagctgcagaaagacaagatggccgaggcctacagcgagatcggaatgaagggcgagcgcagaagaggcaagggacacgatggactgtaccagggactgagcaccgccaccaaggatacctatgacgccctgcacatgcaggccctgcctccaagataa

SEQ ID NO: 3544 - protein, 42 aa, synthetic construct
KRGRKKLLYIFKQPFMRPVQTTQEEDGCSCRFPEEEEGGCEL

SEQ ID NO: 3545 - protein, 112 aa, synthetic construct
RVKFSRSADAPAYKQGQNQLYNELNLGRREEYDVLDKRRGRDPEMGGKPRRKNPQEGLYNELQKDKMAEAYSEIGMKGERRRGKGHDGLYQGLSTATKDTYDALHMQALPPR

SEQ ID NO: 3546 - protein, 241 aa, synthetic construct
QVQLVQSGAEVEKPGASVKVSCKASGYTFTDYYMHWVRQAPGQGLEWMGWINPNSGGTNYAQKFQGRVTMTRDTSISTAYMELSRLRSDDTAVYYCASGWDFDYWGQGTLVTVSSGGGGSGGGGSGGGGSGGGGSDIVMTQSPSSLSASVGDRVTITCRASQSIRYYLSWYQQKPGKAPKLLIYTASILQNGVPSRFSGSGSGTDFTLTISSLQPEDFATYYCLQTYTTPDFGPGTKVEIK

SEQ ID NO: 3547 - protein, 120 aa, synthetic construct
EVKLQESGPGLVAPSQSLSVTCTVSGVSLPDYGVSWIRQPPRKGLEWLGVIWGSETTYYNSALKSRLTIIKDNSKSQVFLKMNSLQTDDTAIYYCAKHYYYGGSYAMDYWGQGTSVTVSS

SEQ ID NO: 3548 - protein, 107 aa, synthetic construct
DIQMTQTTSSLSASLGDRVTISCRASQDISKYLNWYQQKPDGTVKLLIYHTSRLHSGVPSRFSGSGSGTDYSLTISNLEQEDIATYFCQQGNTLPYTFGGGTKLEIT

SEQ ID NO: 3549 - protein, 447 aa, synthetic construct
QVQLVQSGVEVKKPGASVKVSCKASGYTFTNYYMYWVRQAPGQGLEWMGGINPSNGGTNFNEKFKNRVTLTTDSSTTTAYMELKSLQFDDTAVYYCARRDYRFDMGFDYWGQGTTVTVSSASTKGPSVFPLAPCSRSTSESTAALGCLVKDYFPEPVTVSWNSGALTSGVHTFPAVLQSSGLYSLSSVVTVPSSSLGTKTYTCNVDHKPSNTKVDKRVESKYGPPCPPCPAPEFLGGPSVFLFPPKPKDTLMISRTPEVTCVVVDVSQEDPEVQFNWYVDGVEVHNAKTKPREEQFNSTYRVVSVLTVLHQDWLNGKEYKCKVSNKGLPSSIEKTISKAKGQPREPQVYTLPPSQEEMTKNQVSLTCLVKGFYPSDIAVEWESNGQPENNYKTTPPVLDSDGSFFLYSRLTVDKSRWQEGNVFSCSVMHEALHNHYTQKSLSLSLGK

SEQ ID NO: 3550 - protein, 218 aa, synthetic construct
EIVLTQSPATLSLSPGERATLSCRASKGVSTSGYSYLHWYQQKPGQAPRLLIYLASYLESGVPARFSGSGSGTDFTLTISSLEPEDFAVYYCQHSRDLPLTFGGGTKVEIKRTVAAPSVFIFPPSDEQLKSGTASVVCLLNNFYPREAKVQWKVDNALQSGNSQESVTEQDSKDSTYSLSSTLTLSKADYEKHKVYACEVTHQGLSSPVTKSFNRGEC

SEQ ID NO: 3551 - protein, 440 aa, synthetic construct
QVQLVESGGGVVQPGRSLRLDCKASGITFSNSGMHWVRQAPGKGLEWVAVIWYDGSKRYYADSVKGRFTISRDNSKNTLFLQMNSLRAEDTAVYYCATNDDYWGQGTLVTVSSASTKGPSVFPLAPCSRSTSESTAALGCLVKDYFPEPVTVSWNSGALTSGVHTFPAVLQSSGLYSLSSVVTVPSSSLGTKTYTCNVDHKPSNTKVDKRVESKYGPPCPPCPAPEFLGGPSVFLFPPKPKDTLMISRTPEVTCVVVDVSQEDPEVQFNWYVDGVEVHNAKTKPREEQFNSTYRVVSVLTVLHQDWLNGKEYKCKVSNKGLPSSIEKTISKAKGQPREPQVYTLPPSQEEMTKNQVSLTCLVKGFYPSDIAVEWESNGQPENNYKTTPPVLDSDGSFFLYSRLTVDKSRWQEGNVFSCSVMHEALHNHYTQKSLSLSLGK

SEQ ID NO: 3552 - protein, 214 aa, synthetic construct
EIVLTQSPATLSLSPGERATLSCRASQSVSSYLAWYQQKPGQAPRLLIYDASNRATGIPARFSGSGSGTDFTLTISSLEPEDFAVYYCQQSSNWPRTFGQGTKVEIKRTVAAPSVFIFPPSDEQLKSGTASVVCLLNNFYPREAKVQWKVDNALQSGNSQESVTEQDSKDSTYSLSSTLTLSKADYEKHKVYACEVTHQGLSSPVTKSFNRGEC

SEQ ID NO: 3553 - protein, 448 aa, synthetic construct
EVQLVESGGGLVQPGGSLRLSCAASGFTFSDSWIHWVRQAPGKGLEWVAWISPYGGSTYYADSVKGRFTISADTSKNTAYLQMNSLRAEDTAVYYCARRHWPGGFDYWGQGTLVTVSSASTKGPSVFPLAPSSKSTSGGTAALGCLVKDYFPEPVTVSWNSGALTSGVHTFPAVLQSSGLYSLSSVVTVPSSSLGTQTYICNVNHKPSNTKVDKKVEPKSCDKTHTCPPCPAPELLGGPSVFLFPPKPKDTLMISRTPEVTCVVVDVSHEDPEVKFNWYVDGVEVHNAKTKPREEQYASTYRVVSVLTVLHQDWLNGKEYKCKVSNKALPAPIEKTISKAKGQPREPQVYTLPPSREEMTKNQVSLTCLVKGFYPSDIAVEWESNGQPENNYKTTPPVLDSDGSFFLYSKLTVDKSRWQQGNVFSCSVMHEALHNHYTQKSLSLSPGK

SEQ ID NO: 3554 - protein, 214 aa, synthetic construct
DIQMTQSPSSLSASVGDRVTITCRASQDVSTAVAWYQQKPGKAPKLLIYSASFLYSGVPSRFSGSGSGTDFTLTISSLQPEDFATYYCQQYLYHPATFGQGTKVEIKRTVAAPSVFIFPPSDEQLKSGTASVVCLLNNFYPREAKVQWKVDNALQSGNSQESVTEQDSKDSTYSLSSTLTLSKADYEKHKVYACEVTHQGLSSPVTKSFNRGEC

SEQ ID NO: 3555 - protein, 450 aa, synthetic construct
EVQLLESGGGLVQPGGSLRLSCAASGFTFSSYIMMWVRQAPGKGLEWVSSIYPSGGITFYADTVKGRFTISRDNSKNTLYLQMNSLRAEDTAVYYCARIKLGTVTTVDYWGQGTLVTVSSASTKGPSVFPLAPSSKSTSGGTAALGCLVKDYFPEPVTVSWNSGALTSGVHTFPAVLQSSGLYSLSSVVTVPSSSLGTQTYICNVNHKPSNTKVDKKVEPKSCDKTHTCPPCPAPELLGGPSVFLFPPKPKDTLMISRTPEVTCVVVDVSHEDPEVKFNWYVDGVEVHNAKTKPREEQYNSTYRVVSVLTVLHQDWLNGKEYKCKVSNKALPAPIEKTISKAKGQPREPQVYTLPPSRDELTKNQVSLTCLVKGFYPSDIAVEWESNGQPENNYKTTPPVLDSDGSFFLYSKLTVDKSRWQQGNVFSCSVMHEALHNHYTQKSLSLSPGK

SEQ ID NO: 3556 - protein, 216 aa, synthetic construct
QSALTQPASVSGSPGQSITISCTGTSSDVGGYNYVSWYQQHPGKAPKLMIYDVSNRPSGVSNRFSGSKSGNTASLTISGLQAEDEADYYCSSYTSSSTRVFGTGTKVTVLGQPKANPTVTLFPPSSEELQANKATLVCLISDFYPGAVTVAWKADGSPVKAGVETTKPSKQSNNKYAASSYLSLTPEQWKSHRSYSCQVTHEGSTVEKTVAPTECS

SEQ ID NO: 3557 - protein, 451 aa, synthetic construct
EVQLVESGGGLVQPGGSLRLSCAASGFTFSRYWMSWVRQAPGKGLEWVANIKQDGSEKYYVDSVKGRFTISRDNAKNSLYLQMNSLRAEDTAVYYCAREGGWFGELAFDYWGQGTLVTVSSASTKGPSVFPLAPSSKSTSGGTAALGCLVKDYFPEPVTVSWNSGALTSGVHTFPAVLQSSGLYSLSSVVTVPSSSLGTQTYICNVNHKPSNTKVDKRVEPKSCDKTHTCPPCPAPEFEGGPSVFLFPPKPKDTLMISRTPEVTCVVVDVSHEDPEVKFNWYVDGVEVHNAKTKPREEQYNSTYRVVSVLTVLHQDWLNGKEYKCKVSNKALPASIEKTISKAKGQPREPQVYTLPPSREEMTKNQVSLTCLVKGFYPSDIAVEWESNGQPENNYKTTPPVLDSDGSFFLYSKLTVDKSRWQQGNVFSCSVMHEALHNHYTQKSLSLSPGK

SEQ ID NO: 3558 - protein, 215 aa, synthetic construct
EIVLTQSPGTLSLSPGERATLSCRASQRVSSSYLAWYQQKPGQAPRLLIYDASSRATGIPDRFSGSGSGTDFTLTISRLEPEDFAVYYCQQYGSLPWTFGQGTKVEIKRTVAAPSVFIFPPSDEQLKSGTASVVCLLNNFYPREAKVQWKVDNALQSGNSQESVTEQDSKDSTYSLSSTLTLSKADYEKHKVYACEVTHQGLSSPVTKSFNRGEC

SEQ ID NO: 3559 - protein, 133 aa, Homo sapiens [sequence omitted]

SEQ ID NO: 3560 - protein, 197 aa, Homo sapiens
RNLPVATPDPGMFPCLHHSQNLLRAVSNMLQKARQTLEFYPCTSEEIDHEDITKDKTSTVEACLPLELTKNESCLNSRETSFITNGSCLASRKTSFMMALCLSSIYEDLKMYQVEFKTMNAKLLMDPKRQIFLDQNMLAVIDELMQALNFNSETVPQKSSLEEPDFYKTKIKLCILLHAFRIRAVTIDRVMSYLNAS

SEQ ID NO: 3561 - protein, 306 aa, Homo sapiens
IWELKKDVYVVELDWYPDAPGEMVVLTCDTPEEDGITWTLDQSSEVLGSGKTLTIQVKEFGDAGQYTCHKGGEVLSHSLLLLHKKEDGIWSTDILKDQKEPKNKTFLRCEAKNYSGRFTCWWLTTISTDLTFSVKSSRGSSDPQGVTCGAATLSAERVRGDNKEYEYSVECQEDSACPAAEESLPIEVMVDAVHKLKYENYTSSFFIRDIIKPDPPKNLQLKPLKNSRQVEVSWEYPDTWSTPHSYFSLTFCVQVQGKSKREKKDRVFTDKTSATVICRKNASISVRAQDRYYSSSWSEWASVPCS

SEQ ID NO: 3562 - protein, 152 aa, Homo sapiens
DCDIEGKDGKQYESVLMVSIDQLLDSMKEIGSNCLNNEFNFFKRHICDANKEGMFLFRAARKLRQFLKMNSTGDFDLHLLKVSEGTTILLNCTGQVKGRKPAALGEAQPTKSLEENKSLKEQKKLNDLCFLKRLLQEIKTCWNKILMGTKEH

SEQ ID NO: 3563 - protein, 160 aa, Homo sapiens
SPGQGTQSENSCTHFPGNLPNMLRDLRDAFSRVKTFFQMKDQLDNLLLKESLLEDFKGYLGCQALSEMIQFYLEEVMPQAENQDPDIKAHVNSLGENLKTLRLRLRRCHRFLPCENKSKAVEQVKNAFNKLQEKGIYKAMSEFDIFINYIEAYMTMKIRN

SEQ ID NO: 3564 - protein, 114 aa, Homo sapiens
NWVNVISDLKKIEDLIQSMHIDATLYTESDVHPSCKVTAMKCFLLELQVISLESGDASIHDTVENLIILANNSLSSNGNVTESGCKECEELEEKNIKEFLQSFVHIVQMFINTS

SEQ ID NO: 3565 - protein, 157 aa, Homo sapiens
YFGKLESKLSVIRNLNDQVLFIDQGNRPLFEDMTDSDCRDNAPRTIFIISMYKDSQPRGMAVTISVKCEKISTLSCENKIISFKEMNPPDNIKDTKSDIIFFQRSVPGHDNKMQFESSSYEGYFLACEKERDLFKLILKKEDELGDRSIMFTVQNED

SEQ ID NO: 3566 - protein, 209 aa, Homo sapiens
RKGPPAALTLPRVQCRASRYPIAVDCSWTLPPAPNSTSPVSFIATYRLGMAARGHSWPCLQQTPTSTSCTITDVQLFSMAPYVLNVTAVHPWGSSSSFVPFITEHIIKPDPPEGVRLSPLAERQLQVQWEPPGSWPFPEIFSLKYWIRYKRQGAARFHRVGPIEATSFILRAVRPRARYYVQVAAQDLTDYGELSDWSLPATATMSLGK

SEQ ID NO: 3567 - protein, 138 aa, Homo sapiens
QDPYVKEAENLKKYFNAGHSDVADNGTLFLGILKNWKEESDRKIMQSQIVSFYFKLFKNFKDDQSIQKSVETIKEDMNVKFFNSNKKKRDDFEKLTNYSVTDLNVQRKAIHELIQVMAELSPAAKTGKRKRSQMLFRG

SEQ ID NO: 3568 - protein, 112 aa, Homo sapiens
ALDTNYCFSSTEKNCCVRQLYIDFRKDLGWKWIHEPKGYHANFCLGPCPYIWSLDTQYSKVLALYNQHNPGASAAPCCVPQALEPLPIVYYVGRKPKVEQLSNMIVRSCKCS

SEQ ID NO: 3569 - protein, 133 aa, Homo sapiens [sequence omitted]

SEQ ID NO: 3570 - protein, 197 aa, Homo sapiens; identical to SEQ ID NO: 3560

SEQ ID NO: 3571 - protein, 306 aa, Homo sapiens; identical to SEQ ID NO: 3561

SEQ ID NO: 3572 - protein, 152 aa, Homo sapiens; identical to SEQ ID NO: 3562

SEQ ID NO: 3573 - protein, 160 aa, Homo sapiens; identical to SEQ ID NO: 3563

SEQ ID NO: 3574 - protein, 114 aa, Homo sapiens; identical to SEQ ID NO: 3564

SEQ ID NO: 3575 - protein, 157 aa, Homo sapiens; identical to SEQ ID NO: 3565

SEQ ID NO: 3576 - protein, 209 aa, Homo sapiens; identical to SEQ ID NO: 3566

SEQ ID NO: 3577 - protein, 138 aa, Homo sapiens; identical to SEQ ID NO: 3567

SEQ ID NO: 3578 - protein, 112 aa, Homo sapiens; identical to SEQ ID NO: 3568

SEQ ID NO: 3579 - protein, 431 aa, Homo sapiens
MPNPRPGKPSAPSLALGPSPGASPSWRAAPKASDLLGARGPGGTFQGRDLRGGAHASSSSLNPMPPSQLQLPTLPLVMVAPSGARLGPLPHLQALLQDRPHFMHQLSTVDAHARTPVLQVHPLESPAMISLTPPTTATGVFSLKARPGLPPGINVASLEWVSREPALLCTFPNPSAPRKDSTLSAVPQSSYPLLANGVCKWPGCEKVFEEPEDFLKHCQADHLLDEKGRAQCLLQREMVQSLEQQLVLEKEKLSAMQAHLAGKMALTKASSVASSDKGSCCIVAAGSQGPVVPAWSGPREAPDSLFAVRRHLWGSHGNSTFPEFLHNMDYFKFHNMRPPFTYATLIRWAILEAPEKQRTLNEIYHWFTRMFAFFRNHPATWKNAIRHNLSLHKCFVRVESEKGAVWTVDELEFRKKRSQRPSRCSNPTPGP

SEQ ID NO: 3580 - protein, 417 aa, Homo sapiens
MPNPRPGKPSAPSLALGPSPGASPSWRAAPKASDLLGARGPGGTFQGRDLRGGAHASSSSLNPMPPSQLQLPTLPLVMVAPSGARLGPLPHLQALLQDRPHFMHQLSTVDAHARTPVLQVHPLESPAMISLTPPTTATGVFSLKARPGLPPGINVASLEWVSREPALLCTFPNPSAPRKDSTLSAVPQSSYPLLANGVCKWPGCEKVFEEPEDFLKHCQADHLLDEKGRAQCLLQREMVQSLEQQLVLEKEKLSAMQAHLAGKMALTKASSVASSDKGSCCIVAAGSQGPVVPAWSGPREAPDSLFAVRRHLWGSHGNSTFPEFLHNMDYFKFHNMRPPFTYATLIRWAILEAPEKQRTLNEIYHWFTRMFAFFRNHPATWKNAIRHNLSLHKCFVRVESEKGAVWTVDELEFRKKR

SEQ ID NO: 3581 - protein, 366 aa, Homo sapiens
GGAHASSSSLNPMPPSQLQLPTLPLVMVAPSGARLGPLPHLQALLQDRPHFMHQLSTVDAHARTPVLQVHPLESPAMISLTPPTTATGVFSLKARPGLPPGINVASLEWVSREPALLCTFPNPSAPRKDSTLSAVPQSSYPLLANGVCKWPGCEKVFEEPEDFLKHCQADHLLDEKGRAQCLLQREMVQSLEQQLVLEKEKLSAMQAHLAGKMALTKASSVASSDKGSCCIVAAGSQGPVVPAWSGPREAPDSLFAVRRHLWGSHGNSTFPEFLHNMDYFKFHNMRPPFTYATLIRWAILEAPEKQRTLNEIYHWFTRMFAFFRNHPATWKNAIRHNLSLHKCFVRVESEKGAVWTVDELEFRKKR

SEQ ID NO: 3582 - protein, 787 aa, Homo sapiens
MAVWIQAQQLQGEALHQMQALYGQHFPIEVRHYLSQWIESQAWDSVDLDNPQENIKATQLLEGLVQELQKKAEHQVGEDGFLLKIKLGHYATQLQNTYDRCPMELVRCIRHILYNEQRLVREANNGSSPAGSLADAMSQKHLQINQTFEELRLVTQDTENELKKLQQTQEYFIIQYQESLRIQAQFGPLAQLSPQERLSRETALQQKQVSLEAWLQREAQTLQQYRVELAEKHQKTLQLLRKQQTIILDDELIQWKRRQQLAGNGGPPEGSLDVLQSWCEKLAEIIWQNRQQIRRAEHLCQQLPIPGPVEEMLAEVNATITDIISALVTSTFIIEKQPPQVLKTQTKFAATVRLLVGGKLNVHMNPPQVKATIISEQQAKSLLKNENTRNDYSGEILNNCCVMEYHQATGTLSAHFRNMSLKRIKRSDRRGAESVTEEKFTILFESQFSVGGNELVFQVKTLSLPVVVIVHGSQDNNATATVLWDNAFAEPGRVPFAVPDKVLWPQLCEALNMKFKAEVQSNRGLTKENLVFLAQKLFNNSSSHLEDYSGLSVSWSQFNRENLPGRNYTFWQWFDGVMEVLKKHLKPHWNDGAILGFVNKQQAHDLLINKPDGTFLLRFSDSEIGGITIAWKFDSQERMFWNLMPFTTRDFSIRSLADRLGDLNYLIYVFPDRPKDEVYSKYYTPVPCESATAKAVDGYVKPQIKQVVPEFVNASADAGGGSATYMDQAPSPAVCPQAHYNMYPQNPDSVLDTDGDFDLEDTMDVARRVEELLGRPMDSQWIPHAQS

SEQ ID NO: 3583 - protein, 526 aa, Homo sapiens [sequence omitted]

SEQ ID NO: 3584 - DNA, 167 bp, synthetic construct
  source 1..167: mol_type = other DNA
ccctgcagccgtcaccgtaagtttgaagttaccgcatatcagcctctgcttcccagcgcgtccaattcctgttcttattgtttcccctccaggcgttacgcgtgacgacgaactgtgtcgcagctaccacattattccggagccttcattctcgcggctctgatcgt

SEQ ID NO: 3585 - DNA, 43 bp, synthetic construct
  source 1..43: mol_type = other DNA
ggagaccgcggccacgccgagtaggatcgagggtacagtctcc

SEQ ID NO: 3586 - DNA, 167 bp, synthetic construct
  source 1..167: mol_type = other DNA
gacaccaggatcactcttgctctgacccgccctgtgtagaatagactcatgcttccctaagacctggatttcttcccaggcactttcacccgcctgccctgctccttcagtggactgcacccagggaggcggtctctgactgtcctttactttctattctggattgc

SEQ ID NO: 3587 - DNA, 30 bp, synthetic construct
  source 1..30: mol_type = other DNA
aaacccccctaagccgccgccgccgccacc

SEQ ID NO: 3588 - DNA, 18 bp, synthetic construct
  source 1..18: mol_type = other DNA
cccccccaacccgtcacg

SEQ ID NO: 3589 - skipped

SEQ ID NO: 3590 - DNA, 141 bp, synthetic construct
  source 1..141: mol_type = other DNA
tctgcgcactcgtaatcagtactaacccccctttgtcggacactatgcgataatcgatccgcctttttcaccgccttcggaattttatttacctcaactgatcctggagtctctcttggttttcacggaggcctccgccca

SEQ ID NO: 3591 - DNA, 43 bp, synthetic construct; identical to SEQ ID NO: 3585
  source 1..43: mol_type = other DNA

SEQ ID NO: 3592 - DNA, 141 bp, synthetic construct
  source 1..141: mol_type = other DNA
ccccttgaaacccccgccccaggttcagtctctcttcatccctctgtcctgcatggtgatacaaagaccctttgtggaccctaagccatgtagttgctgctccctccttccagttgtgaatattggtttctgttaatcaca

SEQ ID NO: 3593 - DNA, 30 bp, synthetic construct; identical to SEQ ID NO: 3587
  source 1..30: mol_type = other DNA

SEQ ID NO: 3594 - DNA, 18 bp, synthetic construct
  source 1..18: mol_type = other DNA
cccccccaacccgtcacg

SEQ ID NO: 3595-3596 - skipped (2 entries)

SEQ ID NO: 3597 - DNA, 43 bp, synthetic construct
  source 1..43: mol_type = other DNA
aataagagagaaaagaagagtaagaagaaatataagagccacc

SEQ ID NO: 3598 - DNA, 49 bp, synthetic construct
  source 1..49: mol_type = other DNA
cgaactagtattcttctggtccccacagactcagagagaacccgccacc

SEQ ID NO: 3599 - skipped

SEQ ID NO: 3600 - DNA, 14 bp, synthetic construct
  source 1..14: mol_type = other DNA
tgatagctaactag

SEQ ID NO: 3601 - DNA, 14 bp, synthetic construct
  source 1..14: mol_type = other DNA
tagtagctaactag

SEQ ID NO: 3602 - DNA, 14 bp, synthetic construct
  source 1..14: mol_type = other DNA
tgatgactgagtga

SEQ ID NO: 3603 - DNA, 14 bp, synthetic construct
  source 1..14: mol_type = other DNA
tagtagctaggtag

SEQ ID NO: 3604 - skipped

SEQ ID NO: 3605 - DNA, 14 bp, synthetic construct
  source 1..14: mol_type = other DNA
taatagctaactag

SEQ ID NO: 3606 - DNA, 15 bp, synthetic construct
  source 1..15: mol_type = other DNA
taactagctaactag

SEQ ID NO: 3607 - protein, 329 aa, Brucella ceti
MKFGSKIRRLAVAAVAGAIALGASFAVAQAPTFFRIGTGGTAGTYYPIGGLIANAISGAGEKGVPGLVATAVSSNGSVANINAIKSGALESGFTQSDVAYWAYNGTGLYDGKGKVEDLRLLATLYPETIHIVARKDANIKSVADLKGKRVSLDEPGSGTIVDARIVLEAYGLTEDDIKAEHLKPGPAGERLKDGALDAYFFVGGYPTGAISELAISNGISLVPISGPEADKILEKYSFFSKDVVPAGAYKDVAETPTLAVAAQWVTSAKQPDDLIYNITKVLWNEDTRKALDAGHAKGKLIKLDSATSSLGIPLHPGAERFYKEAGVLK

SEQ ID NO: 3608 - protein, 402 aa, Chlamydia psittaci
MKKLLKSALLFAATGSALSLQALPVGNPAEPSLLIDGTMWEGASGDPCDPCATWCDAISIRAGYYGDYVFDRVLKVDVNKTFSGMAATPTQATGNASNTNQPEANGRPNIAYGRHMQDAEWFSNAAFLALNIWDRFDIFCTLGASNGYFKASSAAFNLVGLIGFSAASSISTDLPMQLPNVGITQGVVEFYTDTSFSWSVGARGALWECGCATLGAEFQYAQSNPKIEMLNVTSSPAQFVIHKPRGYKGASSNFPLPITAGTTEATDTKSATIKYHEWQVGLALSYRLNMLVPYIGVNWSRATFDADTIRIAQPKLKSEILNITTWNPSLIGSTTALPNNSGKDVLSDVLQIASIQINKMKSRKACGVAVGATLIDADKWSITGEARLINERAAHMNAQFRF

SEQ ID NO: 3609 - protein, 370 aa, Fusobacterium nucleatum
MKKLALVLGLLLVVGSVASAKEVMPAPTPAPEKVVEYVEKPVIVYRDREVAPAWRPNGSVDVQYRWYGEVEKKNPKDDKDENWATGKVNAGRLQTLTKVNFTEKQTLEVRTRNHHTLNDTDANNKKSNGAADEYRLRHFYNFGKLGSSKVNATSRVEFKQKTNDGEKSLGASVLFDFADYIYSNNFFKVDKLGLRPGYKYVWKGHGNGEEGTPTVHNEYHLAFESDFTLPFNFALNLEYDLSYNRYREKFETTDGLKKAEWYGELTAVLSNYTPLYKAGAFELGFNAEGGYDTYNMHQYKRIGGEDGTSVDRRDYELYLEPTLQVSYKPTDFVKLYAAAGADYRNRITGESEVKRWRWQPTASAGMKVTF

SEQ ID NO: 3610 - protein, 495 aa, Mycobacterium tuberculosis
MNQHFDVLIIGAGLSGIGTACHVTAEFPDKTIALLERRERLGGTWDLFRYPGVRSDSDMFTFGYKFRPWRDVKVLADGASIRQYIADTATEFGVDEKIHYGLKVNTAEWSSRQCRWTVAGVHEATGETRTYTCDYLISCTGYYNYDAGYLPDFPGVHRFGGRCVHPQHWPEDLDYSGKKVVVIGSGATAVTLVPAMAGSNPGSAAHVTMLQRSPSYIFSLPAVDKISEVLGRFLPDRWVYEFGRRRNIAIQRKLYQACRRWPKLMRRLLLWEVRRRLGRSVDMSNFTPNYLPWDERLCAVPNGDLFKTLASGAASVVTDQIETFTEKGILCKSGREIEADIIVTATGLNIQMLGGMRLIVDGAEYQLPEKMTYKGVLLENAPNLAWIIGYTNASWTLKSDIAGAYLCRLLRHMADNGYTVATPRDAQDCALDVGMFDQLNSGYVKRGQDIMPRQGSKHPWRVLMHYEKDAKILLEDPIDDGVLHFAAAAQDHAAA

SEQ ID NO: 3611 - protein, 95 aa, Neisseria gonorrhoeae
MTEQQWNFAGIEAAASAIQGNVTSIHSLLDEGKQSLTKLAAAWGGSGSEAYQGVQQKWDATATELNNALQNLARTISEAGQAMASTEGNVTGMFA

SEQ ID NO: 3612 - protein, 311 aa, Neisseria gonorrhoeae
MKKSLIALTLAALPVAAMADVTLYGTIKAGVETYRFVAHNGAQASGVETATEIADLGSKIGFKGQEDLGNGLKAIWQLEQKAYVSGTNTGWGNRQSFIGLKGGFGKVRVGRLNSVLKDTGGFNPWEGKSEYLSLSNIARPEERPISVRYDSPEFAGFSGSVQYVPNDNSGENKSESYHAGFNYKNSGFFVQYAGSYKRHNYTTEKHQIHRLVGGYDHDALYASVAVQQQDAKLAWPDDNSHNSQTEVATTVAYRFGNVTPRVSYAHGFKGSVYEANHDNTYDQVVVGAEYDFSKRTSALVSAGWLQEGKGA

SEQ ID NO: 3613 - protein, 107 aa, Staphylococcus aureus
FVGYKPYSQNPRDYFVPDNELPPLVHSGFNPSFIATVSHEKGSGDTSEFEITYGRNMDVTHATRRTTHYGNSYLEGSRIHNAFVNRNYTVKYEVNWKTHEIKVKGHN

SEQ ID NO: 3614 - protein, 301 aa, Rhodobacter capsulatus
EVKLSGDARMGVMYNGDDWNFSSRSRVLFTMSGTTDSGLEFGASFKAHESVGAETGEDGTVFLSGAFGKIEMGDALGASEALFGDLYEVGYTDLDDRGGNDIPYLTGDERLTAEDNPVLLYTYSAGAFSVAASMSDGKVGETSEDDAQEMAVAAAYTFGNYTVGLGYEKIDSPDTALMADMEQLELAAIAKFGATNVKAYYADGELDRDFARAVFDLTPVAAAATAVDHKAYGLSVDSTFGATTVGGYVQVLDIDTIDDVTYYGLGASYDLGGGASIVGGIADNDLPNSDMVADLGVKFKF

SEQ ID NO: 3615 - protein, 346 aa, Escherichia coli
MKKTAIAIAVALAGFATVAQAAPKDNTWYTGAKLGWSQYHDTGFINNNGPTHENQLGAGAFGGYQVNPYVGFEMGYDWLGRMPYKGSVENGAYKAQGVQLTAKLGYPITDDLDIYTRLGGMVWRADTKSNVYGKNHDTGVSPVFAGGVEYAITPEIATRLEYQWTNNIGDAHTIGTRPDNGMLSLGVSYRFGQGEAAPVVAPAPAPAPEVQTKHFTLKSDVLFNFNKATLKPEGQAALDQLYSQLSNLDPKDGSVVVLGYTDRIGSDAYNQGLSERRAQSVVDYLISKGIPADKISARGMGESNPVTGNTCDNVKQRAALIDCLAPDRRVEIEVKGIKDVVTQPQA

SEQ ID NO: 3616 - protein, 87 aa, Chlamydia pneumoniae
AGVATATGTKSATINYHEWQVGASLSYRLNSLVPYIGVQWSRATFDADNIRIAQPKLPTAVLNLTAWNPSLLGNATALSTTDSFSDF

SEQ ID NO: 3617 - protein, 631 aa, Streptococcus pyogenes
MTTYQDDFYQAVNGKWAETAVIPDDKPRTGGFSDLADEIEALMLDTTDAWLAGENIPDDAILKNFVKFHRLVADYAKRDEVGVSPILPLIEEYQSLKSFSEFVANIAKYELAGLPNEFPFSVAPDFMNAQLNVLWAEAPSILLPDTTYYEEGNEKAEELRGIWRQSQEKLLPQFGFSTEEIKDLLDKVIELDKQLAKYVLSREEGSEYAKLYHPYVWADFKKLAPELPLDSIFEKILGQVPDKVIVPEERFWTEFAATYYSEANWDLLKANLIVDAANAYNAYLTDDIRVESGAYSRALSGTPQAMDKQKAAFYLAQGPFSQALGLWYAGQKFSPEAKADVESKVARMIEVYKSRLETADWLAPATREKAITKLNVITPHIGYPEKLPETYAKKVIDESLSLVENAQNLAKITIAHTWSKWNKPVDRSEWHMPAHLVNAYYDPQQNQIVFPAAILQEPFYSLDQSSSANYGGIGAVIAHEISHAFDTNGASFDEHGSLNDWWTQEDYAAFKERTDKIVAQFDGLESHGAKVNGKLTVSENVADLGGVACALEAAQSEEDFSARDFFINFATIWRMKAREEYMQMLASIDVHAPGELRTNVTLTNFDAFHETFDIKEGDAMWRAPKDRVIIW

SEQ ID NO: 3618 - protein, 341 aa, Vibrio cholerae
MNKTLIALAVSAAAVATGAYADGINQSGDKAGSTVYSAKGTSLEVGGRAEARLSLKDGKAQDNSRVRLNFLGKAEINDSLYGVGFYEGEFTTNDQGKNASNNSLDNRYTYAGIGGTYGEVTYGKNDGALGVITDFTDIMSYHGNTAAEKIAVADRVDNMLAYKGQFGDLGVKASYRFADRNAVDAMGNVVTETNAAKYSDNGEDGYSLSAIYTFGDTGFNVGAGYADQDDQNEYMLAASYRMENLYFAGLFTDGELAKDVDYTGYELAAGYKLGQAAFTATYNNAETAKETSADNFAIDATYYFKPNFRSYISYQFNLLDSDKVGKVASEDELAIGLRYDF

SEQ ID NO: 3619 - protein, 160 aa, Mycobacterium tuberculosis
MKGGAGVPDLPSLDASGVRLAIVASSWHGKICDALLDGARKVAAGCGLDDPTVVRVLGAIEIPVVAQELARNHDAVVALGVVIRGQTPHFDYVCDAVTQGLTRVSLDSSTPIANGVLTTNTEEQALDRAGLPTSAEDKGAQATVAALATALTLRELRAHS

SEQ ID NO: 3620 - protein, 150 aa, Pasteurella multocida
MKKLTKVLLVAGSVAVLAACGSSKKDESAGQMFGGYSVQDLQQRYNTVYFGFDKYNIEGEYVQILDAHAAFLNATPATKVVVEGNTDERGTPEYNIALGQRRADAVKHYLSAKGVQAGQVSTVSYGEEKPAVLGHDEAAYSKNRRAVLAY

SEQ ID NO: 3621 - protein, 177 aa, Brucella melitensis
MGISKASLLSLAAAGIVLAGCQSSRLGNLDNVSPPPPPAPVNAVPAGTVQKGNLDSPTQFPNAPSTDMSAQSGTQVASLPPASAPDLTPGAVAGVWNASLGGQSCKIATPQTKYGQGYRAGPLRCPGELANLASWAVNGKQLVLYDANGGTVASLYSSGQGRFDGQTTGGQAVTLSR

SEQ ID NO: 3622 - protein, 359 aa, Escherichia coli
MQILADLLNTIPAIDSTAMSRAQRHIDGLLKPVGSLGKLEVLAIQLAGMPGLNGIPHVGKKAVLVMCADHGVWEEGVAISPKEVTAIQAENMTRGTTGVCVLAEQAGANVHVIDVGIDTAEPIPGLINMRVARGSGNIASAPAMSRRQAEKLLLDVICYTQELAKNGVTLFGVGELGMANTTPAAAIVSTITGRDPEEVVGIGANLPTDKLANKIDVVRRAITLNQPNPQDGVDVLAKVGGFDLVGIAGVMLGAASCGLPVLLDGFLSYAAALAACQMSPAIKPYLIPSHLSAEKGARIALSHLGLEPYLNMEMRLGEGSGAALAMPIIEAACAIYNNMGELAASNIVLPGNTTSDLNS

SEQ ID NO: 3623 - protein, 172 aa, Mycobacterium tuberculosis
MKNARTTLIAAAIAGTLVTTSPAGIANADDAGLDPNAAAGPDAVGFDPNLPPAPDAAPVDTPPAPEDAGFDPNLPPPLAPDFLSPPAEEAPPVPVAYSVNWDAIAQCESGGNWSINTGNGYYGGLRFTAGTWRANGGSGSAANASREEQIRVAENVLRSQGIRAWPVCGRRG

SEQ ID NO: 3624 - protein, 130 aa, Mycobacterium tuberculosis
MAKLSTDELLDAFKEMTLLELSDFVKKFEETFEVTAAAPVAVAAAGAAPAGAAVEAAEEQSEFDVILEAAGDKKIGVIKVVREIVSGLGLKEAKDLVDGAPKPLLEKVAKEAADEAKAKLEAAGATVTVK

SEQ ID NO: 3625 - protein, 199 aa, Mycobacterium tuberculosis
MAENSNIDDIKAPLLAALGAADLALATVNELITNLRERAEETRTDTRSRVEESRARLTKLQEDLPEQLTELREKFTAEELRKAAEGYLEAATSRYNELVERGEAALERLRSQQSFEEVSARAEGYVDQAVELTQEALGTVASQTRAVGERAAKLVGIELPKKAAPAKKAAPAKKAAPAKKAAAKKAPAKKAAAKKVTQK

SEQ ID NO: 3626 - protein, 594 aa, Neisseria meningitidis
MNKIYRIIWNSALNAWVAVSELTRNHTKRASATVATAVLATLLFATVQASTTDDDDLYLEPVQRTAVVLSFRSDKEGTGEKEVTEDSNWGVYFDKKGVLTAGTITLKAGDNLKIKQNTNENTNASSFTYSLKKDLTDLTSVGTEKLSFSANSNKVNITSDTKGLNFAKKTAETNGDTTVHLNGIGSTLTDTLLNTGATTNVTNDNVTDDEKKRAASVKDVLNAGWNIKGVKPGTTASDNVDFVRTYDTVEFLSADTKTTTVNVESKDNGKRTEVKIGAKTSVIKEKDGKLVTGKDKGENDSSTDKGEGLVTAKEVIDAVNKAGWRMKTTTANGQTGQADKFETVTSGTNVTFASGKGTTATVSKDDQGNITVMYDVNVGDALNVNQLQNSGWNLDSKAVAGSSGKVISGNVSPSKGKMDETVNINAGNNIEITRNGKNIDIATSMTPQFSSVSLGAGADAPTLSVDDEGALNVGSKDANKPVRITNVAPGVKEGDVTNVAQLKGVAQNLNNHIDNVDGNARAGIAQAIATAGLVQAYLPGKSMMAIGGGTYRGEAGYAIGYSSISDGGNWIIKGTASGNSRGHFGASASVGYQW

SEQ ID NO: 3627 - protein, 376 aa, Escherichia coli
MAKQDYYEILGVSKTAEEREIRKAYKRLAMKYHPDRNQGDKEAEAKFKEIKEAYEVLTDSQKRAAYDQYGHAAFEQGGMGGGGFGGGADFSDIFGDVFGDIFGGGRGRQRAARGADLRYNMELTLEEAVRGVTKEIRIPTLEECDVCHGSGAKPGTQPQTCPTCHGSGQVQMRQGFFAVQQTCPHCQGRGTLIKDPCNKCHGHGRVERSKTLSVKIPAGVDTGDRIRLAGEGEAGEHGAPAGDLYVQVQVKQHPIFEREGNNLYCEVPINFAMAALGGEIEVPTLDGRVKLKVPGETQTGKLFRMRGKGVKSVRGGAQGDLLCRVVVETPVGLNERQKQLLQELQESFGGPTGEHNSPRSKSFFDGVKKFFDDLTR

SEQ ID NO: 3628 - protein, 471 aa, Streptococcus pneumoniae
MANKAVNDFILAMNYDKKKLLTHQGESIENRFIKEGNQLPDEFVVIERKKRSLSTNTSDISVTATNDSRLYPGALLVVDETLLENNPTLLAVDRAPMTYSIDLPGLASSDSFLQVEDPSNSSVRGAVNDLLAKWHQDYGQVNNVPARMQYEKITAHSMEQLKVKFGSDFEKTGNSLDIDFNSVHSGEKQIQIVNFKQIYYTVSVDAVKNPGDVFQDTVTVEDLKQRGISAERPLVYISSVAYGRQVYLKLETTSKSDEVEAAFEALIKGVKVAPQTEWKQILDNTEVKAVILGGDPSSGARVVTGKVDMVEDLIQEGSRFTADHPGLPISYTTSFLRDNVVATFQNSTDYVETKVTAYRNGDLLLDHSGAYVAQYYITWDELSYDHQGKEVLTPKAWDRNGQDLTAHFTTSIPLKGNVRNLSVKIRECTGLAWEWWRTVYEKTDLPLVRKRTISIWGTTLYPQVEDKVEND

SEQ ID NO: 3629 - protein, 498 aa, Escherichia coli
MAQVINTNSLSLITQNNINKNQSALSSSIERLSSGLRINSAKDDAAGQAIANRFTSNIKGLTQAARNANDGISVAQTTEGALSEINNNLQRVRELTVQATTGTNSESDLSSIQDEIKSRLDEIDRVSGQTQFNGVNVLAKNGSMKIQVGANDNQTITIDLKQIDAKTLGLDGFSVKNNDTVTTSAPVTAFGATTTNNIKLTGITLSTEAATDTGGTNPASIEGVYTDNGNDYYAKITGGDNDGKYYAVTVANDGTVTMATGATANATVTDANTTKATTITSGGTPVQIDNTAGSATANLGAVSLVKLQDSKGNDTDTYALKDTNGNLYAADVNETTGAVSVKTITYTDSSGAASSPTAVKLGGDDGKTEVVDIDGKTYDSADLNGGNLQTGLTAGGEALTAVANGKTTDPLKALDDAIASVDKFRSSLGAVQNRLDSAVTNLNNTTTNLSEAQSRIQDADYATEVSNMSKAQIIQQAGNSVLAKANQVPQQVLSLLQG

SEQ ID NO: 3630 - protein, 189 aa, Homo sapiens
MASPFALLMVLVVLSCKSSCSLGCDLPETHSLDNRRTLMLLAQMSRISPSSCLMDRHDFGFPQEEFDGNQFQKAPAISVLHELIQQIFNLFTTKDSSAAWDEDLLDKFCTELYQQLNDLEACVMQEERVGETPLMNADSILAVKKYFRRITLYLTEKKYSPCAWEVVRAEIMRSLSLSTNLQERLRRKE

SEQ ID NO: 3631 - protein, 166 aa, Homo sapiens
MKYTSYILAFQLCIVLGSLGCYCQDPYVKEAENLKKYFNAGHSDVADNGTLFLGILKNWKEESDRKIMQSQIVSFYFKLFKNFKDDQSIQKSVETIKEDMNVKFFNSNKKKRDDFEKLTNYSVTDLNVQRKAIHELIQVMAELSPAAKTGKRKRSQMLFRGRRASQ

SEQ ID NO: 3632 - protein, 153 aa, Homo sapiens
MYRMQLLSCIALSLALVTNSAPTSSSTKKTQLQLEHLLLDLQMILNGINNYKNPKLTRMLTFKFYMPKKATELKHLQCLEEELKPLEEVLNLAQSKNFHLRPRDLISNINVIVLELKGSETTFMCEYADETATIVEFLNRWITFCQSIISTLT

SEQ ID NO: 3633 - protein, 39 aa, Homo sapiens
MWPPGSASQPPPSPAAATGLHPAARPVSLQCRLSMCPAR

SEQ ID NO: 3634 - protein, 338 aa, Homo sapiens [sequence omitted]

SEQ ID NO: 3635 - protein, 162 aa, Homo sapiens
MRISKPHLRSISIQCYLCLLLNSHFLTEAGIHVFILGCFSAGLPKTEANWVNVISDLKKIEDLIQSMHIDATLYTESDVHPSCKVTAMKCFLLELQVISLESGDASIHDTVENLIILANNSLSSNGNVTESGCKECEELEEKNIKEFLQSFVHIVQMFINTS

SEQ ID NO: 3636 - protein, 193 aa, Homo sapiens
MAAEPVEDNCINFVAMKFIDNTLYFIAEDDENLESDYFGKLESKLSVIRNLNDQVLFIDQGNRPLFEDMTDSDCRDNAPRTIFIISMYKDSQPRGMAVTISVKCEKISTLSCENKIISFKEMNPPDNIKDTKSDIIFFQRSVPGHDNKMQFESSSYEGYFLACEKERDLFKLILKKEDELGDRSIMFTVQNED

SEQ ID NO: 3637 - protein, 162 aa, Homo sapiens
MRSSPGNMERIVICLMVIFLGTLVHKSSSQGQDRHMIRMRQLIDIVDQLKNYVNDLVPEFLPAPEDVETNCEWSAFSCFQKAQLKSANTGNNERIINVSIKKLKRKPPSTNAGRRQKHRLTCPSCDSYEKKPPKEFLERFKSLLQKMIHQHLSSRTHGSEDS

SEQ ID NO: 3638 - protein, 144 aa, Homo sapiens
MWLQSLLLLGTVACSISAPARSPSPSTQPWEHVNAIQEARRLLNLSRDTAAEMNETVEVISEMFDLQEPTCLQTRLELYKQGLRGSLTKLKGPLTMMASHYKQHCPPTPETSCATQIITFESFKENLKDFLLVIPFDCWEPVQE

SEQ ID NO: 3639 - protein, 269 aa, Homo sapiens
MAEVPELASEMMAYYSGNEDDLFFEADGPKQMKCSFQDLDLCPLDGGIQLRISDHHYSKGFRQAASVVVAMDKLRKMLVPCPQTFQENDLSTFFPFIFEEEPIFFDTWDNEAYVHDAPVRSLNCTLRDSQQKSLVMSGPYELKALHLQGQDMEQQVVFSMSFVQGEESNDKIPVALGLKEKNLYLSCVLKDDKPTLQLESVDPKNYPKKKMEKRFVFNKIEINNKLEFESAQFPNWYISTSQAENMPVFLGGTKGGQDITDFTMQFVSS

SEQ ID NO: 3640 - protein, 212 aa, Homo sapiens
MNSFSTSAFGPVAFSLGLLLVLPAAFPAPVPPGEDSKDVAAPHRQPLTSSERIDKQIRYILDGISALRKETCNKSNMCESSKEALAENNLNLPKMAEKDGCFQSGFNEETCLVKIITGLLEFEVYLEYLQNRFESSEEQARAVQMSTKVLIQFLQKKAKNLDAITTPDPTTNASLLTKLQAQNQWLQDMTTHLILRSFKEFLQSSLRALRQM

SEQ ID NO: 3641 - protein, 233 aa, Homo sapiens
MSTESMIRDVELAEEALPKKTGGPQGSRRCLFLSLFSFLIVAGATTLFCLLHFGVIGPQREEFPRDLSLISPLAQAVRSSSRTPSDKPVAHVVANPQAEGQLQWLNRRANALLANGVELRDNQLVVPSEGLYLIYSQVLFKGQGCPSTHVLLTHTISRIAVSYQTKVNLLSAIKSPCQRETPEGAEAKPWYEPIYLGGVFQLEKGDRLSAEINRPDYLDFAESGQVYFGIIAL

SEQ ID NO: 3642 - protein, 177 aa, Homo sapiens
MFHVSFRYIFGLPPLILVLLPVASSDCDIEGKDGKQYESVLMVSIDQLLDSMKEIGSNCLNNEFNFFKRHICDANKEGMFLFRAARKLRQFLKMNSTGDFDLHLLKVSEGTTILLNCTGQVKGRKPAALGEAQPTKSLEENKSLKEQKKLNDLCFLKRLLQEIKTCWNKILMGTKEH

SEQ ID NO: 3643 - protein, 155 aa, Homo sapiens
MTPGKTSLVSLLLLLSLEAIVKAGITIPRNPGCPNSEDKNFPRTVMVNLNIHNRNTNTNPKRSSDYYNRSTSPWNLHRNEDPERYPSVIWEAKCRHLGCINADGNVDYHMNSVPIQQEILVLRREPPHCPNSFRLEKILVSVGCTCVTPIVHHVA

SEQ ID NO: 3644 - skipped

SEQ ID NO: 3645 - protein, 235 aa, Homo sapiens
MTVLAPAWSPTTYLLLLLLLSSGLSGTQDCSFQHSPISSDFAVKIRELSDYLLQDYPVTVASNLQDEELCGGLWRLVLAQRWMERLKTVAGSKMQGLLERVNTEIHFVTKCAFQPPPSCLRFVQTNISRLLQETSEQLVALKPWITRQNFSRCLELQCQPDSSTLPPPWSPRPLEATAPTAPQPPLLLLLLLPVGLLLLAAAWCLHWQRTRRRTPRPGEQVPPVPSPQDLLLVEH

SEQ ID NO: 3646 - protein, 448 aa, synthetic construct
QVQLVESGGGVVQPGRSLRLSCAASGFTFSSYTMHWVRQAPGKGLEWVTFISYDGNNKYYADSVKGRFTISRDNSKNTLYLQMNSLRAEDTAIYYCARTGWLGPFDYWGQGTLVTVSSASTKGPSVFPLAPSSKSTSGGTAALGCLVKDYFPEPVTVSWNSGALTSGVHTFPAVLQSSGLYSLSSVVTVPSSSLGTQTYICNVNHKPSNTKVDKRVEPKSCDKTHTCPPCPAPELLGGPSVFLFPPKPKDTLMISRTPEVTCVVVDVSHEDPEVKFNWYVDGVEVHNAKTKPREEQYNSTYRVVSVLTVLHQDWLNGKEYKCKVSNKALPAPIEKTISKAKGQPREPQVYTLPPSRDELTKNQVSLTCLVKGFYPSDIAVEWESNGQPENNYKTTPPVLDSDGSFFLYSKLTVDKSRWQQGNVFSCSVMHEALHNHYTQKSLSLSPGK

SEQ ID NO: 3647 - protein, 440 aa, synthetic construct; identical to SEQ ID NO: 3551

SEQ ID NO: 3648 - protein, 442 aa, synthetic construct
EVQLVQSGAEVKKPGESLRISCKGSGYSFSTYWISWVRQMPGKGLEWMGKIYPGDSYTNYSPSFQGQVTISADKSISTAYLQWSSLKASDTAMYYCARGYGIFDYWGQGTLVTVSSASTKGPSVFPLAPCSRSTSESTAALGCLVKDYFPEPVTVSWNSGALTSGVHTFPAVLQSSGLYSLSSVVTVPSSNFGTQTYTCNVDHKPSNTKVDKTVERKCCVECPPCPAPPVAGPSVFLFPPKPKDTLMISRTPEVTCVVVDVSHEDPEVQFNWYVDGVEVHNAKTKPREEQFNSTFRVVSVLTVVHQDWLNGKEYKCKVSNKGLPAPIEKTISKTKGQPREPQVYTLPPSREEMTKNQVSLTCLVKGFYPSDIAVEWESNGQPENNYKTTPPMLDSDGSFFLYSKLTVDKSRWQQGNVFSCSVMHEALHNHYTQKSLSLSPGK

SEQ ID NO: 3649 - protein, 1464 aa, Homo sapiens
MPEQERQITAREGASRKILSKLSLPTRAWEPAMKKSFAFDNVGYEGGLDGLGPSSQVATSTVRILGMTCQSCVKSIEDRISNLKGIISMKVSLEQGSATVKYVPSVVCLQQVCHQIGDMGFEASIAEGKAASWPSRSLPAQEAVVKLRVEGMTCQSCVSSIEGKVRKLQGVVRVKVSLSNQEAVITYQPYLIQPEDLRDHVNDMGFEAAIKSKVAPLSLGPIDIERLQSTNPKRPLSSANQNFNNSETLGHQGSHVVTLQLRIDGMHCKSCVLNIEENIGQLLGVQSIQVSLENKTAQVKYDPSCTSPVALQRAIEALPPGNFKVSLPDGAEGSGTDHRSSSSHSPGSPPRNQVQGTCSTTLIAIAGMTCASCVHSIEGMISQLEGVQQISVSLAEGTATVLYNPSVISPEELRAAIEDMGFEASVVSESCSTNPLGNHSAGNSMVQTTDGTPTSVQEVAPHTGRLPANHAPDILAKSPQSTRAVAPQKCFLQIKGMTCASCVSNIERNLQKEAGVLSVLVALMAGKAEIKYDPEVIQPLEIAQFIQDLGFEAAVMEDYAGSDGNIELTITGMTCASCVHNIESKLTRTNGITYASVALATSKALVKFDPEIIGPRDIIKIIEEIGFHASLAQRNPNAHHLDHKMEIKQWKKSFLCSLVFGIPVMALMIYMLIPSNEPHQSMVLDHNIIPGLSILNLIFFILCTFVQLLGGWYFYVQAYKSLRHRSANMDVLIVLATSIAYVYSLVILVVAVAEKAERSPVTFFDTPPMLFVFIALGRWLEHLAKSKTSEALAKLMSLQATEATVVTLGEDNLIIREEQVPMELVQRGDIVKVVPGGKFPVDGKVLEGNTMADESLITGEAMPVTKKPGSTVIAGSINAHGSVLIKATHVGNDTTLAQIVKLVEEAQMSKAPIQQLADRFSGYFVPFIIIMSTLTLVVWIVIGFIDFGVVQRYFPNPNKHISQTEVIIRFAFQTSITVLCIACPCSLGLATPTAVMVGTGVAAQNGILIKGGKPLEMAHKIKTMFDKTGTITHGVPRVMRVLLLGDVATLPLRKVLAVVGTAEASSEHPLGVAVTKYCKEELGTETLGYCTDFQAVPGCGIGCKVSNVEGILAHSERPLSAPASHLNEAGSLPAEKDAVPQTFSVLIGNREWLRRNGLTISSDVSDAMTDHEMKGQTAILVAIDGVLCGMIAIADAVKQEAALAVHTLQSMGVDVVLITGDNRKTARAIATQVGINKVFAEVLPSHKVAKVQELQNKGKKVAMVGDGVNDSPALAQADMGVAIGTGTDVAIEAADVVLIRNDLLDVVASIHLSKRTVRRIRINLVLALIYNLVGIPIAAGVFMPIGIVLQPWMGSAAMAASSVSVVLSSLQLKCYKKPDLERYEAQAHGHMKPLTASQVSVHIGMDDRWRDSPRATPWDQVSYVSQVSLSSLTSDKPSRHSAAADDDGDKWSLLLNGRDEEQYI

SEQ ID NO: 3650 - protein, 1321 aa, Homo sapiens
MSDSVILRSIKKFGEENDGFESDKSYNNDKKSRLQDEKKGDGVRVGFFQLFRFSSSTDIWLMFVGSLCAFLHGIAQPGVLLIFGTMTDVFIDYDVELQELQIPGKACVNNTIVWTNSSLNQNMTNGTRCGLLNIESEMIKFASYYAGIAVAVLITGYIQICFWVIAAARQIQKMRKFYFRRIMRMEIGWFDCNSVGELNTRFSDDINKINDAIADQMALFIQRMTSTICGFLLGFFRGWKLTLVIISVSPLIGIGAATIGLSVSKFTDYELKAYAKAGVVADEVISSMRTVAAFGGEKREVERYEKNLVFAQRWGIRKGIVMGFFTGFVWCLIFLCYALAFWYGSTLVLDEGEYTPGTLVQIFLSVIVGALNLGNASPCLEAFATGRAAATSIFETIDRKPIIDCMSEDGYKLDRIKGEIEFHNVTFHYPSRPEVKILNDLNMVIKPGEMTALVGPSGAGKSTALQLIQRFYDPCEGMVTVDGHDIRSLNIQWLRDQIGIVEQEPVLFSTTIAENIRYGREDATMEDIVQAAKEANAYNFIMDLPQQFDTLVGEGGGQMSGGQKQRVAIARALIRNPKILLLDMATSALDNESEAMVQEVLSKIQHGHTIISVAHRLSTVRAADTIIGFEHGTAVERGTHEELLERKGVYFTLVTLQSQGNQALNEEDIKDATEDDMLARTFSRGSYQDSLRASIRQRSKSQLSYLVHEPPLAVVDHKSTYEEDRKDKDIPVQEEVEPAPVRRILKFSAPEWPYMLVGSVGAAVNGTVTPLYAFLFSQILGTFSIPDKEEQRSQINGVCLLFVAMGCVSLFTQFLQGYAFAKSGELLTKRLRKFGFRAMLGQDIAWFDDLRNSPGALTTRLATDASQVQGAAGSQIGMIVNSFTNVTVAMIIAFSFSWKLSLVILCFFPFLALSGATQTRMLTGFASRDKQALEMVGQITNEALSNIRTVAGIGKERRFIEALETELEKPFKTAIQKANIYGFCFAFAQCIMFIANSASYRYGGYLISNEGLHFSYVFRVISAVVLSATALGRAFSYTPSYAKAKISAARFFQLLDRQPPISVYNTAGEKWDNFQGKIDFVDCKFTYPSRPDSQVLNGLSVSISPGQTLAFVGSSGCGKSTSIQLLERFYDPDQGKVMIDGHDSKKVNVQFLRSNIGIVSQEPVLFACSIMDNIKYGDNTKEIPMERVIAAAKQAQLHDFVMSLPEKYETNVGSQGSQLSRGEKQRIAIARAIVRDPKILLLDEATSALDTESEKTVQVALDKAREGRTCIVIAHRLSTIQNADIIAVMAQGVVIEKGTHEELMAQKGAYYKLVTTGSPIS

SEQ ID NO: 3651 - protein, 654 aa, Homo sapiens
MQAARMAASLGRQLLRLGGGSSRLTALLGQPRPGPARRPYAGGAAQLALDKSDSHPSDALTRKKPAKAESKSFAVGFKGQLTTDQVFPYPSVLNEEQTQFLKELVEPVSRFFEEVNDPAKNDALEMVEETTWQGLKELGAFGLQVPSELGGVGLCNTQYARLVEIVGMHDLGVGITLGAHQSIGFKGILLFGTKAQKEKYLPKLASGETVAAFCLTEPSSGSDAASIRTSAVPSPCGKYYTLNGSKLWISNGGLADIFTVFAKTPVTDPATGAVKEKITAFVVERGFGGITHGPPEKKMGIKASNTAEVFFDGVRVPSENVLGEVGSGFKVAMHILNNGRFGMAAALAGTMRGIIAKAVDHATNRTQFGEKIHNFGLIQEKLARMVMLQYVTESMAYMVSANMDQGATDFQIEAAISKIFGSEAAWKVTDECIQIMGGMGFMKEPGVERVLRDLRIFRIFEGTNDILRLFVALQGCMDKGKELSGLGSALKNPFGNAGLLLGEAGKQLRRRAGLGSGLSLSGLVHPELSRSGELAVRALEQFATVVEAKLIKHKKGIVNEQFLLQRLADGAIDLYAMVVVLSRASRSLSEGHPTAQHEKMLCDTWCIEAAARIREGMAALQSDPWQQELYRNFKSISKALVERGGVVTSNPLGF

SEQ ID NO: 3652 - protein, 1532 aa, Homo sapiens
MGHSKQIRILLLNEMEKLEKTLFRLEQGYELQFRLGPTLQGKAVTVYTNYPFPGETFNREKFRSLDWENPTEREDDSDKYCKLNLQQSGSFQYYFLQGNEKSGGGYIVVDPILRVGADNHVLPLDCVTLQTFLAKCLGPFDEWESRLRVAKESGYNMIHFTPLQTLGLSRSCYSLANQLELNPDFSRPNRKYTWNDVGQLVEKLKKEWNVICITDVVYNHTAANSKWIQEHPECAYNLVNSPHLKPAWVLDRALWRFSCDVAEGKYKEKGIPALIENDHHMNSIRKIIWEDIFPKLKLWEFFQVDVNKAVEQFRRLLTQENRRVTKSDPNQHLTIIQDPEYRRFGCTVDMNIALTTFIPHDKGPAAIEECCNWFHKRMEELNSEKHRLINYHQEQAVNCLLGNVFYERLAGHGPKLGPVTRKHPLVTRYFTFPFEEIDFSMEESMIHLPNKACFLMAHNGWVMGDDPLRNFAEPGSEVYLRRELICWGDSVKLRYGNKPEDCPYLWAHMKKYTEITATYFQGVRLDNCHSTPLHVAEYMLDAARNLQPNLYVVAELFTGSEDLDNVFVTRLGISSLIREAMSAYNSHEEGRLVYRYGGEPVGSFVQPCLRPLMPAIAHALFMDITHDNECPIVHRSAYDALPSTTIVSMACCASGSTRGYDELVPHQISVVSEERFYTKWNPEALPSNTGEVNFQSGIIAARCAISKLHQELGAKGFIQVYVDQVDEDIVAVTRHSPSIHQSVVAVSRTAFRNPKTSFYSKEVPQMCIPGKIEEVVLEARTIERNTKPYRKDENSINGTPDITVEIREHIQLNESKIVKQAGVATKGPNEYIQEIEFENLSPGSVIIFRVSLDPHAQVAVGILRNHLTQFSPHFKSGSLAVDNADPILKIPFASLASRLTLAELNQILYRCESEEKEDGGGCYDIPNWSALKYAGLQGLMSVLAEIRPKNDLGHPFCNNLRSGDWMIDYVSNRLISRSGTIAEVGKWLQAMFFYLKQIPRYLIPCYFDAILIGAYTTLLDTAWKQMSSFVQNGSTFVKHLSLGSVQLCGVGKFPSLPILSPALMDVPYRLNEITKEKEQCCVSLAAGLPHFSSGIFRCWGRDTFIALRGILLITGRYVEARNIILAFAGTLRHGLIPNLLGEGIYARYNCRDAVWWWLQCIQDYCKMVPNGLDILKCPVSRMYPTDDSAPLPAGTLDQPLFEVIQEAMQKHMQGIQFRERNAGPQIDRNMKDEGFNITAGVDEETGFVYGGNRFNCGTWMDKMGESDRARNRGIPATPRDGSAVEIVGLSKSAVRWLLELSKKNIFPYHEVTVKRHGKAIKVSYDEWNRKIQDNFEKLFHVSEDPSDLNEKHPNLVHKRGIYKDSYGASSPWCDYQLRPNFTIAMVVAPELFTTEKAWKALEIAEKKLLGPLGMKTLDPDDMVYCGIYDNALDNDNYNLAKGFNYHQGPEWLWPIGYFLRAKLYFSRLMGPETTAKTIVLVKNVLSRHYVHLERSPWKGLPELTNENAQYCPFSCETQAWSIATILETLYDL

SEQ ID NO: 3653 - protein, 2351 aa, Homo sapiens
MQIELSTCFFLCLLRFCFSATRRYYLGAVELSWDYMQSDLGELPVDARFPPRVPKSFPFNTSVVYKKTLFVEFTDHLFNIAKPRPPWMGLLGPTIQAEVYDTVVITLKNMASHPVSLHAVGVSYWKASEGAEYDDQTSQREKEDDKVFPGGSHTYVWQVLKENGPMASDPLCLTYSYLSHVDLVKDLNSGLIGALLVCREGSLAKEKTQTLHKFILLFAVFDEGKSWHSETKNSLMQDRDAASARAWPKMHTVNGYVNRSLPGLIGCHRKSVYWHVIGMGTTPEVHSIFLEGHTFLVRNHRQASLEISPITFLTAQTLLMDLGQFLLFCHISSHQHDGMEAYVKVDSCPEEPQLRMKNNEEAEDYDDDLTDSEMDVVRFDDDNSPSFIQIRSVAKKHPKTWVHYIAAEEEDWDYAPLVLAPDDRSYKSQYLNNGPQRIGRKYKKVRFMAYTDETFKTREAIQHESGILGPLLYGEVGDTLLIIFKNQASRPYNIYPHGITDVRPLYSRRLPKGVKHLKDFPILPGEIFKYKWTVTVEDGPTKSDPRCLTRYYSSFVNMERDLASGLIGPLLICYKESVDQRGNQIMSDKRNVILFSVFDENRSWYLTENIQRFLPNPAGVQLEDPEFQASNIMHSINGYVFDSLQLSVCLHEVAYWYILSIGAQTDFLSVFFSGYTFKHKMVYEDTLTLFPFSGETVFMSMENPGLWILGCHNSDFRNRGMTALLKVSSCDKNTGDYYEDSYEDISAYLLSKNNAIEPRSFSQNSRHPSTRQKQFNATTIPENDIEKTDPWFAHRTPMPKIQNVSSSDLLMLLRQSPTPHGLSLSDLQEAKYETFSDDPSPGAIDSNNSLSEMTHFRPQLHHSGDMVFTPESGLQLRLNEKLGTTAATELKKLDFKVSSTSNNLISTIPSDNLAAGTDNTSSLGPPSMPVHYDSQLDTTLFGKKSSPLTESGGPLSLSEENNDSKLLESGLMNSQESSWGKNVSSTESGRLFKGKRAHGPALLTKDNALFKVSISLLKTNKTSNNSATNRKTHIDGPSLLIENSPSVWQNILESDTEFKKVTPLIHDRMLMDKNATALRLNHMSNKTTSSKNMEMVQQKKEGPIPPDAQNPDMSFFKMLFLPESARWIQRTHGKNSLNSGQGPSPKQLVSLGPEKSVEGQNFLSEKNKVVVGKGEFTKDVGLKEMVFPSSRNLFLTNLDNLHENNTHNQEKKIQEEIEKKETLIQENVVLPQIHTVTGTKNFMKNLFLLSTRQNVEGSYDGAYAPVLQDFRSLNDSTNRTKKHTAHFSKKGEEENLEGLGNQTKQIVEKYACTTRISPNTSQQNFVTQRSKRALKQFRLPLEETELEKRIIVDDTSTQWSKNMKHLTPSTLTQIDYNEKEKGAITQSPLSDCLTRSHSIPQANRSPLPIAKVSSFPSIRPIYLTRVLFQDNSSHLPAASYRKKDSGVQESSHFLQGAKKNNLSLAILTLEMTGDQREVGSLGTSATNSVTYKKVENTVLPKPDLPKTSGKVELLPKVHIYQKDLFPTETSNGSPGHLDLVEGSLLQGTEGAIKWNEANRPGKVPFLRVATESSAKTPSKLLDPLAWDNHYGTQIPKEEWKSQEKSPEKTAFKKKDTILSLNACESNHAIAAINEGQNKPEIEVTWAKQGRTERLCSQNPPVLKRHQREITRTTLQSDQEEIDYDDTISVEMKKEDFDIYDEDENQSPRSFQKKTRHYFIAAVERLWDYGMSSSPHVLRNRAQSGSVPQFKKVVFQEFTDGSFTQPLYRGELNEHLGLLGPYIRAEVEDNIMVTFRNQASRPYSFYSSLISYEEDQRQGAEPRKNFVKPNETKTYFWKVQHHMAPTKDEFDCKAWAYFSDVDLEKDVHSGLIGPLLVCHTNTLNPAHGRQVTVQEFALFFTIFDETKSWYFTENMERNCRAPCNIQMEDPTFKENYRFHAINGYIMDTLPGLVMAQDQRIRWYLLSMGSNENIHSIHFSGHVFTVRKKEEYKMALYNLYPGVFETVEMLPSKAGIWRVECLIGEHLHAGMSTLFLVYSNKCQTPLGMASGHIRDFQITASGQYGQWAPKLARLHYSGSINAWSTKEPFSWIKVDLLAPMIIHGIKTQGARQKFSSLYISQFIIMYSLDGKKWQTYRGNSTGTLMVFFGNVDSSGIKHNIFNPPIIARYIRLHPTHYSIRSTLRMELMGCDLNSCSMPLGMESKAISDAQITASSYFTNMFATWSPSKARLHLQGRSNAWRPQVNNPKEWLQVDFQKTMKVTGVTTQGVKSLLTSMYVKEFLISSSQDGHQWTLFFQNGKVKVFQGNQDSFTPVVNSLDPPLLTRYLRIHPQSWVHQIALRMEVLGCEAQDLY

SEQ ID NO: 3654 - protein, 461 aa, Homo sapiens
MQRVNMIMAESPGLITICLLGYLLSAECTVFLDHENANKILNRPKRYNSGKLEEFVQGNLERECMEEKCSFEEAREVFENTERTTEFWKQYVDGDQCESNPCLNGGSCKDDINSYECWCPFGFEGKNCELDVTCNIKNGRCEQFCKNSADNKVVCSCTEGYRLAENQKSCEPAVPFPCGRVSVSQTSKLTRAETVFPDVDYVNSTEAETILDNITQSTQSFNDFTRVVGGEDAKPGQFPWQVVLNGKVDAFCGGSIVNEKWIVTAAHCVETGVKITVVAGEHNIEETEHTEQKRNVIRIIPHHNYNAAINKYNHDIALLELDEPLVLNSYVTPICIADKEYTNIFLKFGSGYVSGWGRVFHKGRSALVLQYLRVPLVDRATCLRSTKFTIYNNMFCAGFHEGGRDSCQGDSGGPHVTEVEGTSFLTGIISWGEECAMKGKYGIYTKVSRYVNWIKEKTKLT

SEQ ID NO: 3655 - protein, 452 aa, Homo sapiens
MSTAVLENPGLGRKLSDFGQETSYIEDNCNQNGAISLIFSLKEEVGALAKVLRLFEENDVNLTHIESRPSRLKKDEYEFFTHLDKRSLPALTNIIKILRHDIGATVHELSRDKKKDTVPWFPRTIQELDRFANQILSYGAELDADHPGFKDPVYRARRKQFADIAYNYRHGQPIPRVEYMEEEKKTWGTVFKTLKSLYKTHACYEYNHIFPLLEKYCGFHEDNIPQLEDVSQFLQTCTGFRLRPVAGLLSSRDFLGGLAFRVFHCTQYIRHGSKPMYTPEPDICHELLGHVPLFSDRSFAQFSQEIGLASLGAPDEYIEKLATIYWFTVEFGLCKQGDSIKAYGAGLLSSFGELQYCLSEKPKLLPLELEKTAIQNYTVTEFQPLYYVAESFNDAKEKVRNFAATIPRPFSVRYDPYTQRIEVLDNTQQLKILADSINSEIGILCSALQKIK

SEQ ID NO: 3656 - protein, 361 aa, Homo sapiens [sequence omitted]

SEQ ID NO: 3657 - protein, 952 aa, Homo sapiens
MGVRHPPCSHRLLAVCALVSLATAALLGHILLHDFLLVPRELSGSSPVLEETHPAHQQGASRPGPRDAQAHPGRPRAVPTQCDVPPNSRFDCAPDKAITQEQCEARGCCYIPAKQGLQGAQMGQPWCFFPPSYPSYKLENLSSSEMGYTATLTRTTPTFFPKDILTLRLDVMMETENRLHFTIKDPANRRYEVPLETPHVHSRAPSPLYSVEFSEEPFGVIVRRQLDGRVLLNTTVAPLFFADQFLQLSTSLPSQYITGLAEHLSPLMLSTSWTRITLWNRDLAPTPGANLYGSHPFYLALEDGGSAHGVFLLNSNAMDVVLQPSPALSWRSTGGILDVYIFLGPEPKSVVQQYLDVVGYPFMPPYWGLGFHLCRWGYSSTAITRQVVENMTRAHFPLDVQWNDLDYMDSRRDFTFNKDGFRDFPAMVQELHQGGRRYMMIVDPAISSSGPAGSYRPYDEGLRRGVFITNETGQPLIGKVWPGSTAFPDFTNPTALAWWEDMVAEFHDQVPFDGMWIDMNEPSNFIRGSEDGCPNNELENPPYVPGVVGGTLQAATICASSHQFLSTHYNLHNLYGLTEAIASHRALVKARGTRPFVISRSTFAGHGRYAGHWTGDVWSSWEQLASSVPEILQFNLLGVPLVGADVCGFLGNTSEELCVRWTQLGAFYPFMRNHNSLLSLPQEPYSFSEPAQQAMRKALTLRYALLPHLYTLFHQAHVAGETVARPLFLEFPKDSSTWTVDHQLLWGEALLITPVLQAGKAEVTGYFPLGTWYDLQTVPVEALGSLPPPPAAPREPAIHSEGQWVTLPAPLDTINVHLRAGYIIPLQGPGLTTTESRQQPMALAVALTKGGEARGELFWDDGESLEVLERGAYTQVIFLARNNTIVNELVRVTSEGAGLQLQKVTVLGVATAPQQVLSNGVPVSNFTYSPDTKVLDICVSLLMGEQFLVSWC

SEQ ID NO: 3658 - protein, 412 aa, Homo sapiens
MSSKGSVVLAYSGGLDTSCILVWLKEQGYDVIAYLANIGQKEDFEEARKKALKLGAKKVFIEDVSREFVEEFIWPAIQSSALYEDRYLLGTSLARPCIARKQVEIAQREGAKYVSHGATGKGNDQVRFELSCYSLAPQIKVIAPWRMPEFYNRFKGRNDLMEYAKQHGIPIPVTPKNPWSMDENLMHISYEAGILENPKNQAPPGLYTKTQDPAKAPNTPDILEIEFKKGVPVKVTNVKDGTTHQTSLELFMYLNEVAGKHGVGRIDIVENRFIGMKSRGIYETPAGTILYHAHLDIEAFTMDREVRKIKQGLGLKFAELVYTGFWHSPECEFVRHCIAKSQERVEGKVQVSVLKGQVYILGRESPLSLYNEELVSMNVQGDYEPTDATGFININSLRLKEYHRLQSKVTAK

SEQ ID NO: 3659 - protein, 357 aa, Homo sapiens
MEEGMNVLHDFGIQSTHYLQVNYQDSQDWFILVSVIADLRNAFYVLFPIWFHLQEAVGIKLLWVAVIGDWLNLVFKWILFGQRPYWWVLDTDYYSNTSVPLIKQFPVTCETGPGSPSGHAMGTAGVYYVMVTSTLSIFQGKIKPTYRFRCLNVILWLGFWAVQLNVCLSRIYLAAHFPHQVVAGVLSGIAVAETFSHIHSIYNASLKKYFLITFFLFSFAIGFYLLLKGLGVDLLWTLEKAQRWCEQPEWVHIDTTPFASLLKNLGTLFGLGLALNSSMYRESCKGKLSKWLPFRLSSIVASLVLLHVFDSLKPPSQVELVFYVLSFCKSAVVPLASVSVIPYCLAQVLGQPHKKSL

SEQ ID NO: 3660 - protein, 354 aa, Homo sapiens
MLFNLRILLNNAAFRNGHNFMVRNFRCGQPLQNKVQLKGRDLLTLKNFTGEEIKYMLWLSADLKFRIKQKGEYLPLLQGKSLGMIFEKRSTRTRLSTETGFALLGGHPCFLTTQDIHLGVNESLTDTARVLSSMADAVLARVYKQSDLDTLAKEASIPIINGLSDLYHPIQILADYLTLQEHYSSLKGLTLSWIGDGNNILHSIMMSAAKFGMHLQAATPKGYEPDASVTKLAEQYAKENGTKLLLTNDPLEAAHGGNVLITDTWISMGQEEEKKKRLQAFQGYQVTMKTAKVAASDWTFLHCLPRKPEEVDDEVFYSPRSLVFPEAENRKWTIMAVMVSLLTDYSPQLQKPKF

SEQ ID NO: 3661 - protein, 3684 aa, Homo sapiens
MLWWEEVEDCYEREDVQKKTFTKWVNAQFSKFGKQHIENLFSDLQDGRRLLDLLEGLTGQKLPKEKGSTRVHALNNVNKALRVLQNNNVDLVNIGSTDIVDGNHKLTLGLIWNIILHWQVKNVMKNIMAGLQQTNSEKILLSWVRQSTRNYPQVNVINFTTSWSDGLALNALIHSHRPDLFDWNSVVCQQSATQRLEHAFNIARYQLGIEKLLDPEDVDTTYPDKKSILMYITSLFQVLPQQVSIEAIQEVEMLPRPPKVTKEEHFQLHHQMHYSQQITVSLAQGYERTSSPKPRFKSYAYTQAAYVTTSDPTRSPFPSQHLEAPEDKSFGSSLMESEVNLDRYQTALEEVLSWLLSAEDTLQAQGEISNDVEVVKDQFHTHEGYMMDLTAHQGRVGNILQLGSKLIGTGKLSEDEETEVQEQMNLLNSRWECLRVASMEKQSNLHRVLMDLQNQKLKELNDWLTKTEERTRKMEEEPLGPDLEDLKRQVQQHKVLQEDLEQEQVRVNSLTHMVVVVDESSGDHATAALEEQLKVLGDRWANICRWTEDRWVLLQDILLKWQRLTEEQCLFSAWLSEKEDAVNKIHTTGFKDQNEMLSSLQKLAVLKADLEKKKQSMGKLYSLKQDLLSTLKNKSVTQKTEAWLDNFARCWDNLVQKLEKSTAQISQAVTTTQPSLTQTTVMETVTTVTTREQILVKHAQEELPPPPPQKKRQITVDSEIRKRLDVDITELHSWITRSEAVLQSPEFAIFRKEGNFSDLKEKVNAIEREKAEKFRKLQDASRSAQALVEQMVNEGVNADSIKQASEQLNSRWIEFCQLLSERLNWLEYQNNIIAFYNQLQQLEQMTTTAENWLKIQPTTPSEPTAIKSQLKICKDEVNRLSDLQPQIERLKIQSIALKEKGQGPMFLDADFVAFTNHFKQVFSDVQAREKELQTIFDTLPPMRYQETMSAIRTWVQQSETKLSIPQLSVTDYEIMEQRLGELQALQSSLQEQQSGLYYLSTTVKEMSKKAPSEISRKYQEFEEIEGRWKKLSSQLVEHCQKLEEQMNKLRKIQNHIQTLKKWMAEVDVFLKEEWPALGDSEILKKQLKQCRLLVSDIQTIQPSLNSVNEGGQKIKNEAEPEFASRLETELKELNTQWDHMCQQVYARKEALKGGLEKTVSLQKDLSEMHEWMTQAEEEYLERDFEYKTPDELQKAVEEMKRAKEEAQQKEAKVKLLTESVNSVIAQAPPVAQEALKKELETLTTNYQWLCTRLNGKCKTLEEVWACWHELLSYLEKANKWLNEVEFKLKTTENIPGGAEEISEVLDSLENLMRHSEDNPNQIRILAQTLTDGGVMDELINEELETFNSRWRELHEEAVRRQKLLEQSIQSAQETEKSLHLIQESLTFIDKQLAAYIADKVDAAQMPQEAQKIQSDLTSHEISLEEMKKHNQGKEAAQRVLSQIDVAQKKLQDVSMKFRLFQKPANFEQRLQESKMILDEVKMHLPALETKSVEQEVVQSQLNHCVNLYKSLSEVKSEVEMVIKTGRQIVQKKQTENPKELDERVTALKLHYNELGAKVTERKQQLEKCLKLSRKMRKEMNVLTEWLAATDMELTKRSAVEGMPSNLDSEVAWGKATQKEIEKQKVHLKSITEVGEALKTVLGKKETLVEDKLSLLNSNWIAVTSRAEEWLNLLLEYQKHMETFDQNVDHITKWIIQADTLLDESEKKKPQQKEDVLKRLKAELNDIRPKVDSTRDQAANLMANRGDHCRKLVEPQISELNHRFAAISHRIKTGKASIPLKELEQFNSDIQKLLEPLEAEIQQGVNLKEEDFNKDMNEDNEGTVKELLQRGDNLQQRITDERKREEIKIKQQLLQTKHNALKDLRSQRRKKALEISHQWYQYKRQADDLLKCLDDIEKKLASLPEPRDERKIKEIDRELQKKKEELNAVRRQAEGLSEDGAAMAVEPTQIQLSKRWREIESKFAQFRRLNFAQIHTVREETMMVMTEDMPLEISYVPSTYLTEITHVSQALLEVEQLLNAPDLCAKDFEDLFKQEESLKNIKDSLQQSSGRIDIIHSKKTAALQSATPVERVKLQEALSQLDFQWEKVNKMYKDRQGRFDRSVEKWRRFHYDIKIFNQWLTEAEQFLRKTQIPENWEHAKYKWYLKELQDGIGQRQTVVRTLNATGEEIIQQSSKTDASILQEKLGSLNLRWQEVCKQLSDRKKRLEEQKNILSEFQRDLNEFVLWLEEADNIASIPLEPGKEQQLKEKLEQVKLLVEELPLRQGILKQLNETGGPVLVSAPISPEEQDKLENKLKQTNLQWIKVSRALPEKQGEIEAQIKDLGQLEKKLEDLEEQLNHLLLWLSPIRNQLEIYNQPNQEGPFDVKETEIAVQAKQPDVEEILSKGQHLYKEKPATQPVKRKLEDLSSEWKAVNRLLQELRAKQPDLAPGLTTIGASPTQTVTLVTQPVVTKETAISKLEMPSSLMLEVPALADFNRAWTELTDWLSLLDQVIKSQRVMVGDLEDINEMIIKQKATMQDLEQRRPQLEELITAAQNLKNKTSNQEARTIITDRIERIQNQWDEVQEHLQNRRQQLNEMLKDSTQWLEAKEEAEQVLGQARAKLESWKEGPYTVDAIQKKITETKQLAKDLRQWQTNVDVANDLALKLLRDYSADDTRKVHMITENINASWRSIHKRVSEREAALEETHRLLQQFPLDLEKFLAWLTEAETTANVLQDATRKERLLEDSKGVKELMKQWQDLQGEIEAHTDVYHNLDENSQKILRSLEGSDDAVLLQRRLDNMNFKWSELRKKSLNIRSHLEASSDQWKRLHLSLQELLVWLQLKDDELSRQAPIGGDFPAVQKQNDVHRAFKRELKTKEPVIMSTLETVRIFLTEQPLEGLEKLYQEPRELPPEERAQNVTRLLRKQAEEVNTEWEKLNLHSADWQRKIDETLERLQELQEATDELDLKLRQAEVIKGSWQPVGDLLIDSLQDHLEKVKALRGEIAPLKENVSHVNDLARQLTTLGIQLSPYNLSTLEDLNTRWKLLQVAVEDRVRQLHEAHRDFGPASQHFLSTSVQGPWERAISPNKVPYYINHETQTTCWDHPKMTELYQSLADLNNVRFSAYRTAMKLRRLQKALCLDLLSLSAACDALDQHNLKQNDQPMDILQIINCLTTIYDRLEQEHNNLVNVPLCVDMCLNWLLNVYDTGRTGRIRVLSFKTGIISLCKAHLEDKYRYLFKQVASSTGFCDQRRLGLLLHDSIQIPRQLGEVASFGGSNIEPSVRSCFQFANNKPEIEAALFLDWMRLEPQSMVWLPVLHRVAAAETAKHQAKCNICKECPIIGFRYRSLKHFNYDICQSCFFSGRVAKGHKMHYPMVEYCTPTTSGEDVRDFAKVLKNKFRTKRYFAKHPRMGYLPVQTVLEGDNMETPVTLINFWPVDSAPASSPQLSHDDTHSRIEHYASRLAEMENSNGSYLNDSISPNESIDDEHLLIQHYCQSLNQDSPLSQPRSPAQILISLESEERGELERILADLEEENRNLQAEYDRLKQQHEHKGLSPLPSPPEMMPTSPQSPRDAELIAEAKLLRQHKGRLEARMQILEDHNKQLESQLHRLRQLLEQPQAEAKVNGTTVSSPSTSLQRSDSSQPMLLRVVGSQTSDSMGEEDLLSPPQDTSTGLEEVMEQLNNSFPSSRGRNTPGKPMREDTM

SEQ ID NO: 3662 - protein, 3121 aa, Homo sapiens
MPGAAGVLLLLLLSGGLGGVQAQRPQQQRQSQAHQQRGLFPAVLNLASNALITTNATCGEKGPEMYCKLVEHVPGQPVRNPQCRICNQNSSNPNQRHPITNAIDGKNTWWQSPSIKNGIEYHYVTITLDLQQVFQIAYVIVKAANSPRPGNWILERSLDDVEYKPWQYHAVTDTECLTLYNIYPRTGPPSYAKDDEVICTSFYSKIHPLENGEIHISLINGRPSADDPSPELLEFTSARYIRLRFQRIRTLNADLMMFAHKDPREIDPIVTRRYYYSVKDISVGGMCICYGHARACPLDPATNKSRCECEHNTCGDSCDQCCPGFHQKPWRAGTFLTKTECEACNCHGKAEECYYDENVARRNLSLNIRGKYIGGGVCINCTQNTAGINCETCTDGFFRPKGVSPNYPRPCQPCHCDPIGSLNEVCVKDEKHARRGLAPGSCHCKTGFGGVSCDRCARGYTGYPDCKACNCSGLGSKNEDPCFGPCICKENVEGGDCSRCKSGFFNLQEDNWKGCDECFCSGVSNRCQSSYWTYGKIQDMSGWYLTDLPGRIRVAPQQDDLDSPQQISISNAEARQALPHSYYWSAPAPYLGNKLPAVGGQLTFTISYDLEEEEEDTERVLQLMIILEGNDLSISTAQDEVYLHPSEEHTNVLLLKEESFTIHGTHFPVRRKEFMTVLANLKRVLLQITYSFGMDAIFRLSSVNLESAVSYPTDGSIAAAVEVCQCPPGYTGSSCESCWPRHRRVNGTIFGGICEPCQCFGHAESCDDVTGECLNCKDHTGGPYCDKCLPGFYGEPTKGTSEDCQPCACPLNIPSNNFSPTCHLDRSLGLICDGCPVGYTGPRCERCAEGYFGQPSVPGGSCQPCQCNDNLDFSIPGSCDSLSGSCLICKPGTTGRYCELCADGYFGDAVDAKNCQPCRCNAGGSFSEVCHSQTGQCECRANVQGQRCDKCKAGTFGLQSARGCVPCNCNSFGSKSFDCEESGQCWCQPGVTGKKCDRCAHGYFNFQEGGCTACECSHLGNNCDPKTGRCICPPNTIGEKCSKCAPNTWGHSITTGCKACNCSTVGSLDFQCNVNTGQCNCHPKFSGAKCTECSRGHWNYPRCNLCDCFLPGTDATTCDSETKKCSCSDQTGQCTCKVNVEGIHCDRCRPGKFGLDAKNPLGCSSCYCFGTTTQCSEAKGLIRTWVTLKAEQTILPLVDEALQHTTTKGIVFQHPEIVAHMDLMREDLHLEPFYWKLPEQFEGKKLMAYGGKLKYAIYFEAREETGFSTYNPQVIIRGGTPTHARIIVRHMAAPLIGQLTRHEIEMTEKEWKYYGDDPRVHRTVTREDFLDILYDIHYILIKATYGNFMRQSRISEISMEVAEQGRGTTMTPPADLIEKCDCPLGYSGLSCEACLPGFYRLRSQPGGRTPGPTLGTCVPCQCNGHSSLCDPETSICQNCQHHTAGDFCERCALGYYGIVKGLPNDCQQCACPLISSSNNFSPSCVAEGLDDYRCTACPRGYEGQYCERCAPGYTGSPGNPGGSCQECECDPYGSLPVPCDPVTGFCTCRPGATGRKCDGCKHWAREGWECVFCGDECTGLLLGDLARLEQMVMSINLTGPLPAPYKMLYGLENMTQELKHLLSPQRAPERLIQLAEGNLNTLVTEMNELLTRATKVTADGEQTGQDAERTNTRAKSLGEFIKELARDAEAVNEKAIKLNETLGTRDEAFERNLEGLQKEIDQMIKELRRKNLETQKEIAEDELVAAEALLKKVKKLFGESRGENEEMEKDLREKLADYKNKVDDAWDLLREATDKIREANRLFAVNQKNMTALEKKKEAVESGKRQIENTLKEGNDILDEANRLADEINSIIDYVEDIQTKLPPMSEELNDKIDDLSQEIKDRKLAEKVSQAESHAAQLNDSSAVLDGILDEAKNISFNATAAFKAYSNIKDYIDEAEKVAKEAKDLAHEATKLATGPRGLLKEDAKGCLQKSFRILNEAKKLANDVKENEDHLNGLKTRIENADARNGDLLRTLNDTLGKLSAIPNDTAAKLQAVKDKARQANDTAKDVLAQITELHQNLDGLKKNYNKLADSVAKTNAVVKDPSKNKIIADADATVKNLEQEADRLIDKLKPIKELEDNLKKNISEIKELINQARKQANSIKVSVSSGGDCIRTYKPEIKKGSYNNIVVNVKTAVADNLLFYLGSAKFIDFLAIEMRKGKVSFLWDVGSGVGRVEYPDLTIDDSYWYRIVASRTGRNGTISVRALDGPKASIVPSTHHSTSPPGYTILDVDANAMLFVGGLTGKLKKADAVRVITFTGCMGETYFDNKPIGLWNFREKEGDCKGCTVSPQVEDSEGTIQFDGEGYALVSRPIRWYPNISTVMFKFRTFSSSALLMYLATRDLRDFMSVELTDGHIKVSYDLGSGMASVVSNQNHNDGKWKSFTLSRIQKQANISIVDIDTNQEENIATSSSGNNFGLDLKADDKIYFGGLPTLRNLSMKARPEVNLKKYSGCLKDIEISRTPYNILSSPDYVGVTKGCSLENVYTVSFPKPGFVELSPVPIDVGTEINLSFSTKNESGIILLGSGGTPAPPRRKRRQTGQAYYAILLNRGRLEVHLSTGARTMRKIVIRPEPNLFHDGREHSVHVERTRGIFTVQVDENRRYMQNLTVEQPIEVKKLFVGGAPPEFQPSPLRNIPPFEGCIWNLVINSVPMDFARPVSFKNADIGRCAHQKLREDEDGAAPAEIVIQPEPVPTPAFPTPTPVLTHGPCAAESEPALLIGSKQFGLSRNSHIAIAFDDTKVKNRLTIELEVRTEAESGLLFYMARINHADFATVQLRNGLPYFSYDLGSGDTHTMIPTKINDGQWHKIKIMRSKQEGILYVDGASNRTISPKKADILDVVGMLYVGGLPINYTTRRIGPVTYSIDGCVRNLHMAEAPADLEQPTSSFHVGTCFANAQRGTYFDGTGFAKAVGGFKVGLDLLVEFEFRTTTTTGVLLGISSQKMDGMGIEMIDEKLMFHVDNGAGRFTAVYDAGVPGHLCDGQWHKVTANKIKHRIELTVDGNQVEAQSPNPASTSADTNDPVFVGGFPDDLKQFGLTTSIPFRGCIRSLKLTKGTGKPLEVNFAKALELRGVQPVSCPAN

SEQ ID NO: 3663 - protein, 474 aa, Homo sapiens
MRLSKTLVDMDMADYSAALDPAYTTLEFENVQVLTMGNDTSPSEGTNLNAPNSLGVSALCAICGDRATGKHYGASSCDGCKGFFRRSVRKNHMYSCRFSRQCVVDKDKRNQCRYCRLKKCFRAGMKKEAVQNERDRISTRRSSYEDSSLPSINALLQAEVLSRQITSPVSGINGDIRAKKIASIADVCESMKEQLLVLVEWAKYIPAFCELPLDDQVALLRAHAGEHLLLGATKRSMVFKDVLLLGNDYIVPRHCPELAEMSRVSIRILDELVLPFQELQIDDNEYAYLKAIIFFDPDAKGLSDPGKIKRLRSQVQVSLEDYINDRQYDSRGRFGELLLLLPTLQSITWQMIEQIQFIKLFGMAKIDNLLQEMLLGGSPSDAPHAHHPLHPHLMQEHMGTNVIVANTMPTHLSNGQMCEWPRPRGQAATPETPQPSPPGGSGSEPYKLLPGAVATIVKPLSAIPQPTITKQEVI

SEQ ID NO: 3664 - RNA, 40 nt, synthetic construct
  source 1..40: mol_type = other RNA
actcactatttgttttcgcgcccagttgcaaaaagtgtcg

SEQ ID NO: 3665 - RNA, 39 nt, synthetic construct
  source 1..39: mol_type = other RNA
gccagagcaacaaccttccgagccgcgggataaaccgag

SEQ ID NO: 3666 - RNA, 40 nt, synthetic construct
  source 1..40: mol_type = other RNA
ggggaccgcgccccacatgtgagtgaggccgaaacgtaga

SEQ ID NO: 3667 - DNA, 30 bp, synthetic construct
  source 1..30: mol_type = other DNA
tataattctaccctattgaggcattgacta

SEQ ID NO: 3668 - protein, 493 aa, synthetic construct
MALPVTALLLPLALLLHAARPDIVLTQSPASLAVSLGERATINCRASESVSVIGAHLIHWYQQKPGQPPKLLIYLASNLETGVPARFSGSGSGTDFTLTISSLQAEDAAIYYCLQSRIFPRTFGQGTKLEIKGSTSGSGKPGSGEGSTKGQVQLVQSGSELKKPGASVKVSCKASGYTFTDYSINWVRQAPGQGLEWMGWINTETREPAYAYDFRGRFVFSLDTSVSTAYLQISSLKAEDTAVYYCARDYSYAMDYWGQGTLVTVSSAAATTTPAPRPPTPAPTIASQPLSLRPEACRPAAGGAVHTRGLDFACDIYIWAPLAGTCGVLLLSLVITLYCKRGRKKLLYIFKQPFMRPVQTTQEEDGCSCRFPEEEEGGCELRVKFSRSADAPAYQQGQNQLYNELNLGRREEYDVLDKRRGRDPEMGGKPRRKNPQEGLYNELQKDKMAEAYSEIGMKGERRRGKGHDGLYQGLSTATKDTYDALHMQALPPR

SEQ ID NO: 3669 - protein, 207 aa, synthetic construct
KNQVEQSPQSLIILEGKNCTLQCNYTVSPFSNLRWYKQDTGRGPVSLTIMTFSENTKSNGRYTATLDADTKQSSLHITASQLSDSASYICVVNHSGGSYIPTFGRGTSLIVHPYIQKPDPAVYQLRDSKSSDKSVCLFTDFDSQTNVSQSKDSDVYITDKTVLDMRSMDFKSNSAVAWSNKSDFACANAFNNSIIPEDTFFPSPESS

SEQ ID NO: 3670 - protein, 246 aa, synthetic construct
DVKVTQSSRYLVKRTGEKVFLECVQDMDHENMFWYRQDPGLGLRLIYFSYDVKMKEKGDIPEGYSVSREKKERFSLILESASTNQTSMYLCASSFLMTSGDPYEQYFGPGTRLTVTEDLKNVFPPEVAVFEPSEAEISHTQKATLVCLATGFYPDHVELSWWVNGKEVHSGVSTDPQPLKEQPALNDSRYCLSSRLRVSATFWQNPRNHFRCQVQFYGLSENDEWTQDRAKPVTQIVSAEAWGRAD

SEQ ID NO: 3671 - protein, 115 aa, synthetic construct
MQEVTQIPAALSVPEGENLVLNCSFTDSAIYNLQWFRQDPGKGLTSLLLIQSSQREQTSGRLNASLDKSSGRSTLYIAASQPGDSATYLCAVRPTSGGSYIPTFGRGTSLIVHPY

SEQ ID NO: 3672 - protein, 112 aa, synthetic construct
MGVTQTPKFQVLKTGQSMTLQCAQDMNHEYMSWYRQDPGMGLRLIHYSVGAGITDQGEVPNGYNVSRSTTEDFPLRLLSAAPSQTSVYFCASSYVGNTGELFFGEGSRLTVL

SEQ ID NO: 3673 - protein, 166 aa, synthetic construct
APPRLICDSRVLERYLLEAKEAENITTGCAEHCSLNENITVPDTKVNFYAWKRMEVGQQAVEVWQGLALLSEAVLRGQALLVNSSQPWEPLQLHVDKAVSGLRSLTTLLRALGAQKEAISPPDAASAAPLRTITADTFRKLFRVYSNFLRGKLKLYTGEACRTGDR

SEQ ID NO: 3674 - protein, 452 aa, synthetic construct; identical to SEQ ID NO: 3655

SEQ ID NO: 3675 - protein, 1462 aa, synthetic construct
LSVKAQTAHIVLEDGTKMKGYSFGHPSSVAGEVVFNTGLGGYPEAITDPAYKGQILTMANPIIGNGGAPDTTALDELGLSKYLESNGIKVSGLLVLDYSKDYNHWLATKSLGQWLQEEKVPAIYGVDTRMLTKIIRDKGTMLGKIEFEGQPVDFVDPNKQNLIAEVSTKDVKVYGKGNPTKVVAVDCGIKNNVIRLLVKRGAEVHLVPWNHDFTKMEYDGILIAGGPGNPALAEPLIQNVRKILESDRKEPLFGISTGNLITGLAAGAKTYKMSMANRGQNQPVLNITNKQAFITAQNHGYALDNTLPAGWKPLFVNVNDQTNEGIMHESKPFFAVQFHPEVTPGPIDTEYLFDSFFSLIKKGKATTITSVLPKPALVASRVEVSKVLILGSGGLSIGQAGEFDYSGSQAVKAMKEENVKTVLMNPNIASVQTNEVGLKQADTVYFLPITPQFVTEVIKAEQPDGLILGMGGQTALNCGVELFKRGVLKEYGVKVLGTSVESIMATEDRQLFSDKLNEINEKIAPSFAVESIEDALKAADTIGYPVMIRSAYALGGLGSGICPNRETLMDLSTKAFAMTNQILVEKSVTGWKEIEYEVVRDADDNCVTVCNMENVDAMGVHTGDSVVVAPAQTLSNAEFQMLRRTSINVVRHLGIVGECNIQFALHPTSMEYCIIEVNARLSRSSALASKATGYPLAFIAAKIALGIPLPEIKNVVSGKTSACFEPSLDYMVTKIPRWDLDRFHGTSSRIGSSMKSVGEVMAIGRTFEESFQKALRMCHPSIEGFTPRLPMNKEWPSNLDLRKELSEPSSTRIYAIAKAIDDNMSLDEIEKLTYIDKWFLYKMRDILNMEKTLKGLNSESMTEETLKRAKEIGFSDKQISKCLGLTEAQTRELRLKKNIHPWVKQIDTLAAEYPSVTNYLYVTYNGQEHDVNFDDHGMMVLGCGPYHIGSSVEFDWCAVSSIRTLRQLGKKTVVVNCNPETVSTDFDECDKLYFEELSLERILDIYHQEACGGCIISVGGQIPNNLAVPLYKNGVKIMGTSPLQIDRAEDRSIFSAVLDELKVAQAPWKAVNTLNEALEFAKSVDYPCLLRPSYVLSGSAMNVVFSEDEMKKFLEEATRVSQEHPVVLTKFVEGAREVEMDAVGKDGRVISHAISEHVEDAGVHSGDATLMLPTQTISQGAIEKVKDATRKIAKAFAISGPFNVQFLVKGNDVLVIECNLRASRSFPFVSKTLGVDFIDVATKVMIGENVDEKHLPTLDHPIIPADYVAIKAPMFSWPRLRDADPILRCEMASTGEVACFGEGIHTAFLKAMLSTGFKIPQKGILIGIQQSFRPRFLGVAEQLHNEGFKLFATEATSDWLNANNVPATPVAWPSQEGQNPSLSSIRKLIRDGSIDLVINLPNNNTKFVHDNYVIRRTAVDSGIPLLTNFQVTKLFAEAVQKSRKVDSKSLFHYRQYSAGKAA

SEQ ID NO: 3676 - protein, 1053 aa, synthetic construct
MKRNYILGLDIGITSVGYGIIDYETRDVIDAGVRLFKEANVENNEGRRSKRGARRLKRRRRHRIQRVKKLLFDYNLLTDHSELSGINPYEARVKGLSQKLSEEEFSAALLHLAKRRGVHNVNEVEEDTGNELSTKEQISRNSKALEEKYVAELQLERLKKDGEVRGSINRFKTSDYVKEAKQLLKVQKAYHQLDQSFIDTYIDLLETRRTYYEGPGEGSPFGWKDIKEWYEMLMGHCTYFPEELRSVKYAYNADLYNALNDLNNLVITRDENEKLEYYEKFQIIENVFKQKKKPTLKQIAKEILVNEEDIKGYRVTSTGKPEFTNLKVYHDIKDITARKEIIENAELLDQIAKILTIYQSSEDIQEELTNLNSELTQEEIEQISNLKGYTGTHNLSLKAINLILDELWHTNDNQIAIFNRLKLVPKKVDLSQQKEIPTTLVDDFILSPVVKRSFIQSIKVINAIIKKYGLPNDIIIELAREKNSKDAQKMINEMQKRNRQTNERIEEIIRTTGKENAKYLIEKIKLHDMQEGKCLYSLEAIPLEDLLNNPFNYEVDHIIPRSVSFDNSFNNKVLVKQEENSKKGNRTPFQYLSSSDSKISYETFKKHILNLAKGKGRISKTKKEYLLEERDINRFSVQKDFINRNLVDTRYATRGLMNLLRSYFRVNNLDVKVKSINGGFTSFLRRKWKFKKERNKGYKHHAEDALIIANADFIFKEWKKLDKAKKVMENQMFEEKQAESMPEIETEQEYKEIFITPHQIKHIKDFKDYKYSHRVDKKPNRELINDTLYSTRKDDKGNTLIVNNLNGLYDKDNDKLKKLINKSPEKLLMYHHDPQTYQKLKLIMEQYGDEKNPLYKYYEETGNYLTKYSKKDNGPVIKKIKYYGNKLNAHLDITDDYPNSRNKVVKLSLKPYRFDVYLDNGVYKFVTVKNLDVIKKENYYEVNSKCYEEAKKLKKISNQAEFIASFYNNDLIKINGELYRVIGVNNDLLNRIEVNMIDITYREYLENMNDKRPPRIIKTIASKTQSIKKYSTDILGNLYEVKSKKHPQIIKKG

SEQ ID NO: 3677 - protein, 1353 aa, synthetic construct
AAGGILHLELLVAVGPDVFQAHQEDTERYVLTNLNIGAELLRDPSLGAQFRVHLVKMVILTEPEGAPNITANLTSSLLSVCGWSQTINPEDDTDPGHADLVLYITRFDLELPDGNRQVRGVTQLGGACSPTWSCLITEDTGFDLGVTIAHEIGHSFGLEHDGAPGSGCGPSGHVMASDGAAPRAGLAWSPCSRRQLLSLLSAGRARCVWDPPRPQPGSAGHPPDAQPGLYYSANEQCRVAFGPKAVACTFAREHLDMCQALSCHTDPLDQSSCSRLLVPLLDGTECGVEKWCSKGRCRSLVELTPIAAVHGRWSSWGPRSPCSRSCGGGVVTRRRQCNNPRPAFGGRACVGADLQAEMCNTQACEKTQLEFMSQQCARTDGQPLRSSPGGASFYHWGAAVPHSQGDALCRHMCRAIGESFIMKRGDSFLDGTRCMPSGPREDGTLSLCVSGSCRTFGCDGRMDSQQVWDRCQVCGGDNSTCSPRKGSFTAGRAREYVTFLTVTPNLTSVYIANHRPLFTHLAVRIGGRYVVAGKMSISPNTTYPSLLEDGRVEYRVALTEDRLPRLEEIRIWGPLQEDADIQVYRRYGEEYGNLTRPDITFTYFQPKPRQAWVWAAVRGPCSVSCGAGLRWVNYSCLDQARKELVETVQCQGSQQPPAWPEACVLEPCPPYWAVGDFGPCSASCGGGLRERPVRCVEAQGSLLKTLPPARCRAGAQQPAVALETCNPQPCPARWEVSEPSSCTSAGGAGLALENETCVPGADGLEAPVTEGPGSVDEKLPAPEPCVGMSCPPGWGHLDATSAGEKAPSPWGSIRTGAQAAHVWTPAAGSCSVSCGRGLMELRFLCMDSALRVPVQEELCGLASKPGSRREVCQAVPCPARWQYKLAACSVSCGRGVVRRILYCARAHGEDDGEEILLDTQCQGLPRPEPQEACSLEPCPPRWKVMSLGPCSASCGLGTARRSVACVQLDQGQDVEVDEAACAALVRPEASVPCLIADCTYRWHVGTWMECSVSCGDGIQRRRDTCLGPQAQAPVPADFCQHLPKPVTVRGCWAGPCVGQGTPSLVPHEEAAAPGRTTATPAGASLEWSQARGLLFSPAPQPRRLLPGPQENSVQSSACGRQHLEPTGTIDMRGPGQADCAVAIGRPLGEVVTLRVLESSLNCSAGDMLLLWGRLTWRKMCRKLLDMTFSSKTNTLVVRQRCGRPGGGVLLRYGSQLAPETFYRECDMQLFGPWGEIVSPSLSPATSNAGGCRLFINVAPHARIAIHALATNMGAGTEGANASYILIRDTHSLRTTAFHGQQVLYWESESSQAEMEFSEGFLKAQASLRGQYWTLQSWVPEMQDPQSWKGKEGT

SEQ ID NO: 3678 - protein, 431 aa, synthetic construct; identical to SEQ ID NO: 3579

SEQ ID NO: 3679 - protein, 160 aa, synthetic construct; identical to SEQ ID NO: 3563

SEQ ID NO: 3680 - protein, 133 aa, synthetic construct [sequence omitted]

SEQ ID NO: 3681 - protein, 54 aa, synthetic construct
MLQMAGQCSQNEYFDSLLHACIPCQLRCSSNTPPLTCQRYCNASVTNSVKGTNA

SEQ ID NO: 3682 - protein, 23 aa, synthetic construct
ILWTCLGLSLIISLAVFVLMFLL

SEQ ID NO: 3683 - protein, 107 aa, synthetic construct
RKINSEPLKDEFKNTGSGLLGMANIDLEKSRTGDEIILPRGLEYTVEECTCEDCIKSKPKVDSDHCFPLPAMEEGATILVTTKTNDYCKSLPAALSATEIEKSISAR

SEQ ID NO: 3684 - protein, 10 aa, synthetic construct
MLQMAGQCSQ

SEQ ID NO: 3685 - protein, 14 aa, synthetic construct
CSQNEYFDSLLHAC

SEQ ID NO: 3686 - protein, 13 aa, synthetic construct
NEYFDSLLHACIP

SEQ ID NO: 3687 - protein, 11 aa, synthetic construct
ACIPCQLRCSS

SEQ ID NO: 3688 - protein, 19 aa, synthetic construct
CQLRCSSNTPPLTCQRYCN

SEQ ID NO: 3689 - protein, 10 aa, synthetic construct
LTCQRYCNAS

SEQ ID NO: 3690 - protein, 488 aa, synthetic construct
MALPVTALLLPLALLLHAARPQVKLEESGGGLVQAGRSLRLSCAASEHTFSSHVMGWFRQAPGKERESVAVIGWRDISTSYADSVKGRFTISRDNAKKTLYLQMNSLKPEDTAVYYCAARRIDAADFDSWGQGTQVTVSSGGGGSEVQLVESGGGLVQAGGSLRLSCAASGRTFTMGWFRQAPGKEREFVAAISLSPTLAYYAESVKGRFTISRDNAKNTVVLQMNSLKPEDTALYYCAADRKSVMSIRPDYWGQGTQVTVSSTSTTTPAPRPPTPAPTIASQPLSLRPEACRPAAGGAVHTRGLDFACDIYIWAPLAGTCGVLLLSLVITLYCKRGRKKLLYIFKQPFMRPVQTTQEEDGCSCRFPEEEEGGCELRVKFSRSADAPAYQQGQNQLYNELNLGRREEYDVLDKRRGRDPEMGGKPRRKNPQEGLYNELQKDKMAEAYSEIGMKGERRRGKGHDGLYQGLSTATKDTYDALHMQALPPR

SEQ ID NO: 3691 - protein, 498 aa, synthetic construct
MALPVTALLLPLALLLHAARPQVKLEESGGGLVQAGRSLRLSCAASEHTFSSHVMGWFRQAPGKERESVAVIGWRDISTSYADSVKGRFTISRDNAKKTLYLQMNSLKPEDTAVYYCAARRIDAADFDSWGQGTQVTVSSGGGGSGGGGSGGGGSEVQLVESGGGLVQAGGSLRLSCAASGRTFTMGWFRQAPGKEREFVAAISLSPTLAYYAESVKGRFTISRDNAKNTVVLQMNSLKPEDTALYYCAADRKSVMSIRPDYWGQGTQVTVSSTSTTTPAPRPPTPAPTIASQPLSLRPEACRPAAGGAVHTRGLDFACDIYIWAPLAGTCGVLLLSLVITLYCKRGRKKLLYIFKQPFMRPVQTTQEEDGCSCRFPEEEEGGCELRVKFSRSADAPAYQQGQNQLYNELNLGRREEYDVLDKRRGRDPEMGGKPRRKNPQEGLYNELQKDKMAEAYSEIGMKGERRRGKGHDGLYQGLSTATKDTYDALHMQALPPR

SEQ ID NO: 3692 - protein, 508 aa, synthetic construct
MALPVTALLLPLALLLHAARPQVKLEESGGGLVQAGRSLRLSCAASEHTFSSHVMGWFRQAPGKERESVAVIGWRDISTSYADSVKGRFTISRDNAKKTLYLQMNSLKPEDTAVYYCAARRIDAADFDSWGQGTQVTVSSGGGGSGGGGSGGGGSGGGGSGGGGSEVQLVESGGGLVQAGGSLRLSCAASGRTFTMGWFRQAPGKEREFVAAISLSPTLAYYAESVKGRFTISRDNAKNTVVLQMNSLKPEDTALYYCAADRKSVMSIRPDYWGQGTQVTVSSTSTTTPAPRPPTPAPTIASQPLSLRPEACRPAAGGAVHTRGLDFACDIYIWAPLAGTCGVLLLSLVITLYCKRGRKKLLYIFKQPFMRPVQTTQEEDGCSCRFPEEEEGGCELRVKFSRSADAPAYQQGQNQLYNELNLGRREEYDVLDKRRGRDPEMGGKPRRKNPQEGLYNELQKDKMAEAYSEIGMKGERRRGKGHDGLYQGLSTATKDTYDALHMQALPPR

SEQ ID NO: 3693 - protein, 493 aa, synthetic construct
MALPVTALLLPLALLLHAARPEVQLVESGGGLVQAGGSLRLSCAASGRTFTMGWFRQAPGKEREFVAAISLSPTLAYYAESVKGRFTISRDNAKNTVVLQMNSLKPEDTALYYCAADRKSVMSIRPDYWGQGTQVTVSSGGGGSGGGGSQVKLEESGGGLVQAGRSLRLSCAASEHTFSSHVMGWFRQAPGKERESVAVIGWRDISTSYADSVKGRFTISRDNAKKTLYLQMNSLKPEDTAVYYCAARRIDAADFDSWGQGTQVTVSSTSTTTPAPRPPTPAPTIASQPLSLRPEACRPAAGGAVHTRGLDFACDIYIWAPLAGTCGVLLLSLVITLYCKRGRKKLLYIFKQPFMRPVQTTQEEDGCSCRFPEEEEGGCELRVKFSRSADAPAYQQGQNQLYNELNLGRREEYDVLDKRRGRDPEMGGKPRRKNPQEGLYNELQKDKMAEAYSEIGMKGERRRGKGHDGLYQGLSTATKDTYDALHMQALPPR

SEQ ID NO: 3694 - protein, 498 aa, synthetic construct
MALPVTALLLPLALLLHAARPEVQLVESGGGLVQAGGSLRLSCAASGRTFTMGWFRQAPGKEREFVAAISLSPTLAYYAESVKGRFTISRDNAKNTVVLQMNSLKPEDTALYYCAADRKSVMSIRPDYWGQGTQVTVSSGGGGSGGGGSGGGGSQVKLEESGGGLVQAGRSLRLSCAASEHTFSSHVMGWFRQAPGKERESVAVIGWRDISTSYADSVKGRFTISRDNAKKTLYLQMNSLKPEDTAVYYCAARRIDAADFDSWGQGTQVTVSSTSTTTPAPRPPTPAPTIASQPLSLRPEACRPAAGGAVHTRGLDFACDIYIWAPLAGTCGVLLLSLVITLYCKRGRKKLLYIFKQPFMRPVQTTQEEDGCSCRFPEEEEGGCELRVKFSRSADAPAYQQGQNQLYNELNLGRREEYDVLDKRRGRDPEMGGKPRRKNPQEGLYNELQKDKMAEAYSEIGMKGERRRGKGHDGLYQGLSTATKDTYDALHMQALPPR

SEQ ID NO: 3695 - protein, 503 aa, synthetic construct
MALPVTALLLPLALLLHAARPEVQLVESGGGLVQAGGSLRLSCAASGRTFTMGWFRQAPGKEREFVAAISLSPTLAYYAESVKGRFTISRDNAKNTVVLQMNSLKPEDTALYYCAADRKSVMSIRPDYWGQGTQVTVSSGGGGSGGGGSGGGGSGGGGSQVKLEESGGGLVQAGRSLRLSCAASEHTFSSHVMGWFRQAPGKERESVAVIGWRDISTSYADSVKGRFTISRDNAKKTLYLQMNSLKPEDTAVYYCAARRIDAADFDSWGQGTQVTVSSTSTTTPAPRPPTPAPTIASQPLSLRPEACRPAAGGAVHTRGLDFACDIYIWAPLAGTCGVLLLSLVITLYCKRGRKKLLYIFKQPFMRPVQTTQEEDGCSCRFPEEEEGGCELRVKFSRSADAPAYQQGQNQLYNELNLGRREEYDVLDKRRGRDPEMGGKPRRKNPQEGLYNELQKDKMAEAYSEIGMKGERRRGKGHDGLYQGLSTATKDTYDALHMQALPPR

SEQ ID NO: 3696 - protein, 122 aa, synthetic construct
QVQLVESGGGLVQPGGSLRLSCEASGFTLDYYAIGWFRQAPGKEREGVICISRSDGSTYYADSVKGRFTISRDNAKKTVYLQMISLKPEDTAAYYCAAGADCSGYLRDYEFRGQGTQVTVSS

SEQ ID NO: 3697 - protein, 128 aa, synthetic construct
QVKLEESGGRLVQPRGSLRLSCAGSGRTFSTYGMAWFRQAPGKEREFVASKASMNYSGRTYYADSVKGRFTIARDNAKNMVFLQMNNLKPEDTAVYYCAAGTGCSTYGCFDAQIIDYWGKGTLVTVSS

SEQ ID NO: 3698 - protein, 118 aa, synthetic construct
EVQLVESGGGLVQAGGSLRLSCAASGRTFTMGWFRQAPGKEREFVAAISLSPTLAYYAESVKGRFTISRDNAKNTVVLQMNSLKPEDTALYYCAADRKSVMSIRPDYWGQGTQVTVSS

SEQ ID NO: 3699 - protein, 120 aa, synthetic construct
AVQLVDSGGGLVQPGGSLRLSCVASGGIFVINAMGWYRQAPGKQRELVASIRGLGRTNYDDSVKGRFTISRDNANNTVYLQMNSLEPEDTAVYYCTVYVTLLGGVNRDYWGQGTQVTVSS

SEQ ID NO: 3700 - protein, 119 aa, synthetic construct
EVQLVESGGGLVQAGGSLRLSCAASGRTFSSIVMGWFRQAPGKEREFVGAIMWNDGITYLQDSVKGRFTIFRDNAKNTVYLQMNSLKLEDTAVYYCAASKGRYSEYEYWGQGTQVTVSS

SEQ ID NO: 3701 - protein, 128 aa, synthetic construct
EVQLVESGGGVVQAGGSLTVSCTASGFTFDRAVIVWFRQAPGKGREGVSFIKPSDGTIYYIDSLKGRFTISSDIAKNTVYLQMKSLESEDSAVYYCAASPEDWYTDWIDWSIYRWQHWGQGTQVTVSS

SEQ ID NO: 3702 - protein, 119 aa, synthetic construct
EVQLVESGGGMVQAGDSLRLSCVQSTYTVNSDVMGWFRQAPGKEREFVGAIMWNDGITYLQDSVKGRFTIFRDNAKNTVYLQMNSLKLEDTAVYYCAASKGRYSEYEYWGQGTQVTVSS

SEQ ID NO: 3703 - protein, 120 aa, synthetic construct
AVQLVESGGGLVQAGDSLRLSCTASGATLTNDHMAWFRQAPGKGREFVAAIDWSGRTTNYADPVEGRFTISRNNAKNTVYLEMNSLKLEDTAVYYCAVLRAWISYDNDYWGQGTQVTVSS

SEQ ID NO: 3704 - protein, 120 aa, synthetic construct
QVQLVESGGGLVQAGGSLRLSCAASGGTLSKNTVAWFRQAPGKERGFVASITWDGRTTYYADSVKGRFTISRDNAKNTVYLQMNSLKPEDTAVYVCADLGKWPAGPADYWGQGTQVTVSS

SEQ ID NO: 3705 - protein, 119 aa, synthetic construct
QVKLEESGGGLVQAGRSLRLSCAASEHTFSSHVMGWFRQAPGKERESVAVIGWRDISTSYADSVKGRFTISRDNAKKTLYLQMNSLKPEDTAVYYCAARRIDAADFDSWGQGTQVTVSS

SEQ ID NO: 3706 - protein, 119 aa, synthetic construct
AVQLVESGGGLVQAGDSLRLTCTASGRAFSTYFMAWFRQAPGKEREFVAGIAWSGGSTAYADSVKGRFTISRDNAKNTVYLQMNSLKSEDTAVYYCASRGIEVEEFGAWGQGTQVTVSS

SEQ ID NO: 3707 - protein, 122 aa, synthetic construct; identical to SEQ ID NO: 3696

SEQ ID NO: 3708 - protein, 119 aa, synthetic construct; identical to SEQ ID NO: 3705

SEQ ID NO: 3709 - protein, 118 aa, synthetic construct; identical to SEQ ID NO: 3698

SEQ ID NO: 3710 - protein, 124 aa, synthetic construct
EVQLVESGGGLVPPGGSLRLSCTASGSTVSINVMAWYRQVSGKQRELVAAVTRDGRKSCGDSVKGRFTISRDGAKNAVYLQMNSLKPEDTAVYLCGADGWGATTLDYTYGMDYWGKGTQVTVSS

SEQ ID NO: 3711 - protein, 118 aa, synthetic construct
AVQLVESGGGLVQAGGSLRLSCAASGRTFTMGWFRQAPGKERGFVASITWDGRSAYYAESVKGRFTISRDNAKNTVVLQMNSLKPEDTALYYCAADRKSVMSIRPDYWGQGTQVTVSS

SEQ ID NO: 3712 - protein, 122 aa, synthetic construct
QVQLVESGGGLVQPGGSLRLACEAPGSGNSINAMGWYRQTPGKRRELVATITRGGSTNYGPSVKGRFTITRDNVKNTVHLQMNSLKPDDTAVYYCNAERLDGSGYGYEYDYWGQGTQVTVSS

SEQ ID NO: 3713 - protein, 121 aa, synthetic construct
QVKLEESGGGLVQAGGSLRLSCAASGGTLSKNTVAWVRQAPGKERGFVTSITCDGRTTYYANSVNGRFPINRNNAENLVVLQMNSLKPDDTALYYCAAYRKSIMSIQPDYWGQGTQVTVSS

SEQ ID NO: 3714 - protein, 121 aa, synthetic construct
DVQLVESGGGLVQAGGSLRLSCAASGRTFSSIVMGWFRQAPGKEREFVGAIMWNDGLTYLQGSVKGRFTISRDNAKNTVVLQMNSLKPEDTALYYCAADRKSVMSIRPDYWGQGTQVTVSS

SEQ ID NO: 3715 - protein, 116 aa, synthetic construct
QVQLVESGGGLVQAGGSLRLSCAASGRTFTMGWFRQAPGKEREFVAAISLSPTLAYYAESVKGRFTISRDNAKNTVVLQMNSLKPEDTAVYYCAARRIDAADFDSWGQGTQVTVSS

SEQ ID NO: 3716 - protein, 120 aa, synthetic construct; identical to SEQ ID NO: 3704

SEQ ID NO: 3717 - protein, 121 aa, synthetic construct
QVQLVESGGGLVQPGGSLTLSCAASGSIDSINTMDWFRQAPGKEREFVAAISLSPTLAYYAESVKGRFTISRDNAKNTVVLQMNSLKPEDTALYYCAADRKSVMSIRPDYWGQGTQVTVSS

SEQ ID NO: 3718 - protein, 120 aa, synthetic construct
DVQLVESGGGLVQAGGSLRLSCAASGGTLSKNTVAWVRQAPGKERGFVTSITCDGRTTYYANSVKGRFPISRDNAENTVYLQMNSLKPEDTAGYVCADLGKWPAGSADYWGQGTHVTVSS

SEQ ID NO: 3719 - protein, 121 aa, synthetic construct
QVKLEESGGGLVQPGGSLRLSCTASEFTFSDYWMHWVRQAPGKGLEWVASIDTSGQTTYYADSLKGRFTISRDNAKSTLYLQMNSLKSEDTGVYFCAKRYRGGTWYGMANWGKGTQVTVSS

SEQ ID NO: 3720 - protein, 120 aa, synthetic construct
QVQLVESGGGLVQAGGSLRLSCAASGRTLSSNTMAWFRQAPGKEREFVASTTWNGRSTYYADSVKGRFTISRDNAKNTMYLQMNSLKPEDTAVYVCADLGKWPAGPADYWGQGTQVTVSS

SEQ ID NO: 3721 - protein, 116 aa, synthetic construct
QVQLVESGGGLVQAGGSLRLSCAASGRTFTMGWFRQAPGKQRELVADISGGRTNYADSVKGRFTISRDNAKNTVYLQMNSLKPEDTAVYYCAADRKSVMSIRPDYWGQGTQVTVSS

SEQ ID NO: 3722 - protein, 104 aa, synthetic construct
QVQLVESGGGLVQAGASLRLSCAASGRTFTVAAISLSPTLAYYAESVKGRFTISRDNAKNTVVLQMNSLKPEDTALYYCAADRKSVMSIRPDYWGQGTQVTVSS

SEQ ID NO: 3723 - protein, 125 aa, synthetic construct
DVQLVESGGGLEQAGGSLRLSCAASGGTLSKNTVAWFRQAPGKERGFVASITWDGRTTYYADSVKGRFTISRDNAKNTVYLQMNSLKPEDTAVYYCASTASCHLFGLGSGAFVSWGRGTQVTVSS

SEQ ID NO: 3724 - protein, 116 aa, synthetic construct
AVQLVESGGGLVQAGGSLRLSCAASGRTFTMGWFHQAPGKEREFVAAISLSPTLAYYAESVKGRFTISRDNAKNTVVLQMNSLKPEDTALYYCAASKDRYSEYEYWGQGTQVTVSS

SEQ ID NO: 3725 - protein, 114 aa, synthetic construct
QVKLEESGGGLVQAGGSLRLSCAASGRTFTMGWFRQAPGKEREFVAAISLSPTLAYYAESVKGRFTISRDNAKNTVVLQMNSLKPEDTALYYCAKKNGGPVDYWGKGTQVTVSS

SEQ ID NO: 3726 - protein, 119 aa, synthetic construct
DVQLVESGGGLVQPGGSLRLSCAASGRTFSSIVMGWFRQAPGKEREFVGAIMWNDGITYLQDSVKGRFTIFRDNAKNTVYLQMNSLKLEDTAVYYCAASKGRYSEYEYWGQGTQVTVSS

SEQ ID NO: 3727 - protein, 118 aa, synthetic construct
QVKLEESGGRLVQAGGSLKLSWAASGRTFTMGWFRQAPGKEREFVTAINLSPTLTYYAESVKGRFPISRNNAQNTVVLQMNSLKPEDTALYYCAAERKSVMAIPPDYWGQGTQVTVSS

SEQ ID NO: 3728 - protein, 118 aa, synthetic construct; identical to SEQ ID NO: 3727

SEQ ID NO: 3729 - protein, 118 aa, synthetic construct
EVQLVESGGGLVQAGGSLRLSCAASGRTFTMGGFRRVPRDEREFVASITLIPTFPYYAYSVKGRFALFRDNPNNTVILLMISLKPEDPDLYYCASYRKYLMSILPDYWGQGTQGTVSS

SEQ ID NO: 3730 - protein, 124 aa, synthetic construct
QVKLEESGGGLVQAGGSLRLSCAASGRTFTMGWFRQAPGKEREFVAAISLSPTLAYYAESVKGRFTISRDNAKNTVDLQMNSLKPEDTAVYFCAANRNSQRVIAALSWIGMNYWGEWTQVTVSS

SEQ ID NO: 3731 - protein, 116 aa, synthetic construct
QVQLVESGGGLVQAGGSLRLSCAASGRTFTMGWFRQAPGKEREFVAAISLSPTLAYYAESVKGRFTISRDNAKKTLYLRMNSLKPEDTAVYYCAARRIDAADFDSWGQGTQVTVSS

SEQ ID NO: 3732 - protein, 116 aa, synthetic construct
QVKLEESGGGLVQAGGSLRLSCAASGRTFTMGWFRRAPGKERESVAVIGWRDINASYADSVKGRFAISRDNAKKTLYLQMNSLKPEDTAVYYCAARRIDATDFDSWGQGTQVTVSS

SEQ ID NO: 3733 - protein, 119 aa, synthetic construct
QVKLEESGGGLVQTGGSLRLSCAASEHTFSNHVMGWFRQAPGKERESVAVIGWRDISTSYADSVKGRFTISRDNAKKTLYLQMNSLKPEDTAVYYCAARRIDAADFDSRGQGTQVTVSS

SEQ ID NO: 3734 - protein, 123 aa, synthetic construct
AVQLVDSGGGLVQAGGSLRISCAVSGRTSSNYILAWFRQAPGKERDFVAHISRSGGKSGYGDSVKGRFTISRDNAENTVRVYLQMNSLKPGDTAVYYCNRPLWYGSPTLIDYWGQGTQVTVSS

SEQ ID NO: 3735 - protein, 118 aa, synthetic construct
QVQLVESGGGLVQAGGSLRLSCAASGRTFTMGWFRQAPGKEREFVAAISLSPTLAYYAESVKGRFTISRDNAKNTVVLQMNSLKPEDTALYYCAADRKSVMSIRPDYWGQGTQVTVSS

SEQ ID NO: 3736 - protein, 118 aa, synthetic construct
AVQLVDSGGGLVQAGGSLRLSCAASGRTFTMGWFRQAPGKEREFVAAISLSPTLAYYAEPVKGRFTISRDNAKNTVVLQMNSLKPEDTALYYCAADRKSVMSIRPDYWGQGTQVTVSS

SEQ ID NO: 3737 - protein, 121 aa, synthetic construct
DVQLVESGGGSVQTGGSLRLSCTASGRTLNNFVMGWFRQAPGKEREFVAAISLSPTLAYYVESVKGRFTISRDNAKNTVVLQMNSLKPEDTALYYCAADRKSVMSIRPDYWGQGTQVTVSS

SEQ ID NO: 3738 - protein, 210 aa, synthetic construct
APGKEREGVICISRSDGSTYYADSVKGRFTISRDNAKKTVYLQMISLKPEDTAAYYCAAGADCSGYLRDYEFRGQGTQVTVSSGGGGSQVQLVESGGGLVQPGGSLRLSCEASGFTLDYYAIGWFRQAPGKEREGVICISRSDGSTYYADSVKGRFTISRDNAKKTVYLQMISLKPEDTAAYYCAAGADCSGYLRDYEFRGQGTQVTVSS

SEQ ID NO: 3739 - protein, 376 aa, synthetic construct
QVQLVESGGGLVQPGGSLRLSCEASGFTLDYYAIGWFRQAPGKEREGVICISRSDGSTYYADSVKGRFTISRDNAKKTVYLQMISLKPEDTAAYYCAAGADCSGYLRDYEFRGQGTQVTVSSGGGGSQVQLVESGGGLVQPGGSLRLSCEASGFTLDYYAIGWFRQAPGKEREGVICISRSDGSTYYADSVKGRFTISRDNAKKTVYLQMISLKPEDTAAYYCAAGADCSGYLRDYEFRGQGTQVTVSSGGGGSQVQLVESGGGLVQPGGSLRLSCEASGFTLDYYAIGWFRQAPGKEREGVICISRSDGSTYYADSVKGRFTISRDNAKKTVYLQMISLKPEDTAAYYCAAGADCSGYLRDYEFRGQGTQVTVSS

SEQ ID NO: 3740 - protein, 242 aa, synthetic construct
QVKLEESGGGLVQAGRSLRLSCAASEHTFSSHVMGWFRQAPGKERESVAVIGWRDISTSYADSVKGRFTISRDNAKKTLYLQMNSLKPEDTAVYYCAARRIDAADFDSWGQGTQVTVSSGGGGSEVQLVESGGGLVQAGGSLRLSCAASGRTFTMGWFRQAPGKEREFVAAISLSPTLAYYAESVKGRFTISRDNAKNTVVLQMNSLKPEDTALYYCAADRKSVMSIRPDYWGQGTQVTVSS

SEQ ID NO: 3741 - protein, 252 aa, synthetic construct
QVKLEESGGGLVQAGRSLRLSCAASEHTFSSHVMGWFRQAPGKERESVAVIGWRDISTSYADSVKGRFTISRDNAKKTLYLQMNSLKPEDTAVYYCAARRIDAADFDSWGQGTQVTVSSGGGGSGGGGSGGGGSEVQLVESGGGLVQAGGSLRLSCAASGRTFTMGWFRQAPGKEREFVAAISLSPTLAYYAESVKGRFTISRDNAKNTVVLQMNSLKPEDTALYYCAADRKSVMSIRPDYWGQGTQVTVSS

SEQ ID NO: 3742 - protein, 262 aa, synthetic construct
QVKLEESGGGLVQAGRSLRLSCAASEHTFSSHVMGWFRQAPGKERESVAVIGWRDISTSYADSVKGRFTISRDNAKKTLYLQMNSLKPEDTAVYYCAARRIDAADFDSWGQGTQVTVSSGGGGSGGGGSGGGGSGGGGSGGGGSEVQLVESGGGLVQAGGSLRLSCAASGRTFTMGWFRQAPGKEREFVAAISLSPTLAYYAESVKGRFTISRDNAKNTVVLQMNSLKPEDTALYYCAADRKSVMSIRPDYWGQGTQVTVSS

SEQ ID NO: 3743 - protein, 247 aa, synthetic construct
EVQLVESGGGLVQAGGSLRLSCAASGRTFTMGWFRQAPGKEREFVAAISLSPTLAYYAESVKGRFTISRDNAKNTVVLQMNSLKPEDTALYYCAADRKSVMSIRPDYWGQGTQVTVSSGGGGSGGGGSQVKLEESGGGLVQAGRSLRLSCAASEHTFSSHVMGWFRQAPGKERESVAVIGWRDISTSYADSVKGRFTISRDNAKKTLYLQMNSLKPEDTAVYYCAARRIDAADFDSWGQGTQVTVSS

SEQ ID NO: 3744 - protein, 252 aa, synthetic construct
EVQLVESGGGLVQAGGSLRLSCAASGRTFTMGWFRQAPGKEREFVAAISLSPTLAYYAESVKGRFTISRDNAKNTVVLQMNSLKPEDTALYYCAADRKSVMSIRPDYWGQGTQVTVSSGGGGSGGGGSGGGGSQVKLEESGGGLVQAGRSLRLSCAASEHTFSSHVMGWFRQAPGKERESVAVIGWRDISTSYADSVKGRFTISRDNAKKTLYLQMNSLKPEDTAVYYCAARRIDAADFDSWGQGTQVTVSS

SEQ ID NO: 3745 - protein, 257 aa, synthetic construct
EVQLVESGGGLVQAGGSLRLSCAASGRTFTMGWFRQAPGKEREFVAAISLSPTLAYYAESVKGRFTISRDNAKNTVVLQMNSLKPEDTALYYCAADRKSVMSIRPDYWGQGTQVTVSSGGGGSGGGGSGGGGSGGGGSQVKLEESGGGLVQAGRSLRLSCAASEHTFSSHVMGWFRQAPGKERESVAVIGWRDISTSYADSVKGRFTISRDNAKKTLYLQMNSLKPEDTAVYYCAARRIDAADFDSWGQGTQVTVSS

SEQ ID NO: 3746 - protein, 243 aa, synthetic construct
QVKLEESGGGLVQAGRSLRLSCAASEHTFSSHVMGWFRQAPGKERESVAVIGWRDISTSYADSVKGRFTISRDNAKKTLYLQMNSLKPEDTAVYYCAARRIDAADFDSWGQGTQVTVSSGGGGSAVQLVESGGGLVQAGDSLRLTCTASGRAFSTYFMAWFRQAPGKEREFVAGIAWSGGSTAYADSVKGRFTISRDNAKNTVYLQMNSLKSEDTAVYYCASRGIEVEEFGAWGQGTQVTVSS

SEQ ID NO: 3747 - protein, 253 aa, synthetic construct
QVKLEESGGGLVQAGRSLRLSCAASEHTFSSHVMGWFRQAPGKERESVAVIGWRDISTSYADSVKGRFTISRDNAKKTLYLQMNSLKPEDTAVYYCAARRIDAADFDSWGQGTQVTVSSGGGGSGGGGSGGGGSAVQLVESGGGLVQAGDSLRLTCTASGRAFSTYFMAWFRQAPGKEREFVAGIAWSGGSTAYADSVKGRFTISRDNAKNTVYLQMNSLKSEDTAVYYCASRGIEVEEFGAWGQGTQVTVSS

SEQ ID NO: 3748 - protein, 263 aa, synthetic construct
QVKLEESGGGLVQAGRSLRLSCAASEHTFSSHVMGWFRQAPGKERESVAVIGWRDISTSYADSVKGRFTISRDNAKKTLYLQMNSLKPEDTAVYYCAARRIDAADFDSWGQGTQVTVSSGGGGSGGGGSGGGGSGGGGSGGGGSAVQLVESGGGLVQAGDSLRLTCTASGRAFSTYFMAWFRQAPGKEREFVAGIAWSGGSTAYADSVKGRFTISRDNAKNTVYLQMNSLKSEDTAVYYCASRGIEVEEFGAWGQGTQVTVSS

SEQ ID NO: 3749 - protein, 248 aa, synthetic construct
AVQLVESGGGLVQAGDSLRLTCTASGRAFSTYFMAWFRQAPGKEREFVAGIAWSGGSTAYADSVKGRFTISRDNAKNTVYLQMNSLKSEDTAVYYCASRGIEVEEFGAWGQGTQVTVSSGGGGSGGGGSQVKLEESGGGLVQAGRSLRLSCAASEHTFSSHVMGWFRQAPGKERESVAVIGWRDISTSYADSVKGRFTISRDNAKKTLYLQMNSLKPEDTAVYYCAARRIDAADFDSWGQGTQVTVSS

SEQ ID NO: 3750 - protein, 253 aa, synthetic construct
AVQLVESGGGLVQAGDSLRLTCTASGRAFSTYFMAWFRQAPGKEREFVAGIAWSGGSTAYADSVKGRFTISRDNAKNTVYLQMNSLKSEDTAVYYCASRGIEVEEFGAWGQGTQVTVSSGGGGSGGGGSGGGGSQVKLEESGGGLVQAGRSLRLSCAASEHTFSSHVMGWFRQAPGKERESVAVIGWRDISTSYADSVKGRFTISRDNAKKTLYLQMNSLKPEDTAVYYCAARRIDAADFDSWGQGTQVTVSS

SEQ ID NO: 3751 - protein, 219 aa, synthetic construct
APGKEREFVAGIAWSGGSTAYADSVKGRFTISRDNAKNTVYLQMNSLKSEDTAVYYCASRGIEVEEFGAWGQGTQVTVSSGGGGSGGGGSGGGGSGGGGSQVKLEESGGGLVQAGRSLRLSCAASEHTFSSHVMGWFRQAPGKERESVAVIGWRDISTSYADSVKGRFTISRDNAKKTLYLQMNSLKPEDTAVYYCAARRIDAADFDSWGQGTQVTVSS

SEQ ID NO: 3752 - protein, 252 aa, synthetic construct
EVQLVESGGGMVQAGDSLRLSCVQSTYTVNSDVMGWFRQAPGKEREFVGAIMWNDGITYLQDSVKGRFTIFRDNAKNTVYLQMNSLKLEDTAVYYCAASKGRYSEYEYWGQGTQVTVSSGGGGSQVKLEESGGRLVQPRGSLRLSCAGSGRTFSTYGMAWFRQAPGKEREFVASKASMNYSGRTYYADSVKGRFTIARDNAKNMVFLQMNNLKPEDTAVYYCAAGTGCSTYGCFDAQIIDYWGKGTLVTVSS

SEQ ID NO: 3753 - protein, 262 aa, synthetic construct
EVQLVESGGGMVQAGDSLRLSCVQSTYTVNSDVMGWFRQAPGKEREFVGAIMWNDGITYLQDSVKGRFTIFRDNAKNTVYLQMNSLKLEDTAVYYCAASKGRYSEYEYWGQGTQVTVSSGGGGSGGGGSGGGGSQVKLEESGGRLVQPRGSLRLSCAGSGRTFSTYGMAWFRQAPGKEREFVASKASMNYSGRTYYADSVKGRFTIARDNAKNMVFLQMNNLKPEDTAVYYCAAGTGCSTYGCFDAQIIDYWGKGTLVTVSS

SEQ ID NO: 3754 - protein, 272 aa, synthetic construct
EVQLVESGGGMVQAGDSLRLSCVQSTYTVNSDVMGWFRQAPGKEREFVGAIMWNDGITYLQDSVKGRFTIFRDNAKNTVYLQMNSLKLEDTAVYYCAASKGRYSEYEYWGQGTQVTVSSGGGGSGGGGSGGGGSGGGGSGGGGSQVKLEESGGRLVQPRGSLRLSCAGSGRTFSTYGMAWFRQAPGKEREFVASKASMNYSGRTYYADSVKGRFTIARDNAKNMVFLQMNNLKPEDTAVYYCAAGTGCSTYGCFDAQIIDYWGKGTLVTVSS

SEQ ID NO: 3755 - protein, 257 aa, synthetic construct
EVQLVESGGGMVQAGDSLRLSCVQSTYTVNSDVMGWFRQAPGKEREFVGAIMWNDGITYLQDSVKGRFTIFRDNAKNTVYLQMNSLKLEDTAVYYCAASKGRYSEYEYWGQGTQVTVSSGGGGSGGGGSQVKLEESGGRLVQPRGSLRLSCAGSGRTFSTYGMAWFRQAPGKEREFVASKASMNYSGRTYYADSVKGRFTIARDNAKNMVFLQMNNLKPEDTAVYYCAAGTGCSTYGCFDAQIIDYWGKGTLVTVSS

SEQ ID NO: 3756 - protein, 262 aa, synthetic construct; identical to SEQ ID NO: 3753

SEQ ID NO: 3757 - protein, 267 aa, synthetic construct
EVQLVESGGGMVQAGDSLRLSCVQSTYTVNSDVMGWFRQAPGKEREFVGAIMWNDGITYLQDSVKGRFTIFRDNAKNTVYLQMNSLKLEDTAVYYCAASKGRYSEYEYWGQGTQVTVSSGGGGSGGGGSGGGGSGGGGSQVKLEESGGRLVQPRGSLRLSCAGSGRTFSTYGMAWFRQAPGKEREFVASKASMNYSGRTYYADSVKGRFTIARDNAKNMVFLQMNNLKPEDTAVYYCAAGTGCSTYGCFDAQIIDYWGKGTLVTVSS

SEQ ID NO: 3758 - protein, 254 aa, synthetic construct
QVKLEESGGRLVQPRGSLRLSCAGSGRTFSTYGMAWFRQAPGKEREFVASKASMNYSGRTYYADSVKGRFTIARDNAKNMVFLQMNNLKPEDTAVYYCAAGTGCSTYGCFDAQIIDYWGKGTLVTVSSGGGGSQVKLEESGGGLVQAGGSLRLSCAASGGTLSKNTVAWVRQAPGKERGFVTSITCDGRTTYYANSVNGRFPINRNNAENLVVLQMNSLKPDDTALYYCAAYRKSIMSIQPDYWGQGTQVTVSS

SEQ ID NO: 3759 - protein, 264 aa, synthetic construct
QVKLEESGGRLVQPRGSLRLSCAGSGRTFSTYGMAWFRQAPGKEREFVASKASMNYSGRTYYADSVKGRFTIARDNAKNMVFLQMNNLKPEDTAVYYCAAGTGCSTYGCFDAQIIDYWGKGTLVTVSSGGGGSGGGGSGGGGSQVKLEESGGGLVQAGGSLRLSCAASGGTLSKNTVAWVRQAPGKERGFVTSITCDGRTTYYANSVNGRFPINRNNAENLVVLQMNSLKPDDTALYYCAAYRKSIMSIQPDYWGQGTQVTVSS

SEQ ID NO: 3760 - protein, 274 aa, synthetic construct
QVKLEESGGRLVQPRGSLRLSCAGSGRTFSTYGMAWFRQAPGKEREFVASKASMNYSGRTYYADSVKGRFTIARDNAKNMVFLQMNNLKPEDTAVYYCAAGTGCSTYGCFDAQIIDYWGKGTLVTVSSGGGGSGGGGSGGGGSGGGGSGGGGSQVKLEESGGGLVQAGGSLRLSCAASGGTLSKNTVAWVRQAPGKERGFVTSITCDGRTTYYANSVNGRFPINRNNAENLVVLQMNSLKPDDTALYYCAAYRKSIMSIQPDYWGQGTQVTVSS

SEQ ID NO: 3761 - protein, 259 aa, synthetic construct
QVKLEESGGRLVQPRGSLRLSCAGSGRTFSTYGMAWFRQAPGKEREFVASKASMNYSGRTYYADSVKGRFTIARDNAKNMVFLQMNNLKPEDTAVYYCAAGTGCSTYGCFDAQIIDYWGKGTLVTVSSGGGGSGGGGSQVKLEESGGGLVQAGGSLRLSCAASGGTLSKNTVAWVRQAPGKERGFVTSITCDGRTTYYANSVNGRFPINRNNAENLVVLQMNSLKPDDTALYYCAAYRKSIMSIQPDYWGQGTQVTVSS

SEQ ID NO: 3762 - protein, 264 aa, synthetic construct; identical to SEQ ID NO: 3759

SEQ ID NO: 3763 - protein, 269 aa, synthetic construct
QVKLEESGGRLVQPRGSLRLSCAGSGRTFSTYGMAWFRQAPGKEREFVASKASMNYSGRTYYADSVKGRFTIARDNAKNMVFLQMNNLKPEDTAVYYCAAGTGCSTYGCFDAQIIDYWGKGTLVTVSSGGGGSGGGGSGGGGSGGGGSQVKLEESGGGLVQAGGSLRLSCAASGGTLSKNTVAWVRQAPGKERGFVTSITCDGRTTYYANSVNGRFPINRNNAENLVVLQMNSLKPDDTALYYCAAYRKSIMSIQPDYWGQGTQVTVSS

SEQ ID NO: 3764 - protein, 246 aa, synthetic construct
QVKLEESGGGLVQAGGSLRLSCAASGGTLSKNTVAWVRQAPGKERGFVTSITCDGRTTYYANSVNGRFPINRNNAENLVVLQMNSLKPDDTALYYCAAYRKSIMSIQPDYWGQGTQVTVSSGGGGSQVQLVESGGGLVQAGGSLRLSCAASGGTLSKNTVAWFRQAPGKERGFVASITWDGRTTYYADSVKGRFTISRDNAKNTVYLQMNSLKPEDTAVYVCADLGKWPAGPADYWGQGTQVTVSS

SEQ ID NO: 3765 - protein, 256 aa, synthetic construct
QVKLEESGGGLVQAGGSLRLSCAASGGTLSKNTVAWVRQAPGKERGFVTSITCDGRTTYYANSVNGRFPINRNNAENLVVLQMNSLKPDDTALYYCAAYRKSIMSIQPDYWGQGTQVTVSSGGGGSGGGGSGGGGSQVQLVESGGGLVQAGGSLRLSCAASGGTLSKNTVAWFRQAPGKERGFVASITWDGRTTYYADSVKGRFTISRDNAKNTVYLQMNSLKPEDTAVYVCADLGKWPAGPADYWGQGTQVTVSS

SEQ ID NO: 3766 - protein, 266 aa, synthetic construct
QVKLEESGGGLVQAGGSLRLSCAASGGTLSKNTVAWVRQAPGKERGFVTSITCDGRTTYYANSVNGRFPINRNNAENLVVLQMNSLKPDDTALYYCAAYRKSIMSIQPDYWGQGTQVTVSSGGGGSGGGGSGGGGSGGGGSGGGGSQVQLVESGGGLVQAGGSLRLSCAASGGTLSKNTVAWFRQAPGKERGFVASITWDGRTTYYADSVKGRFTISRDNAKNTVYLQMNSLKPEDTAVYVCADLGKWPAGPADYWGQGTQVTVSS

SEQ ID NO: 3767 - protein, 251 aa, synthetic construct
QVKLEESGGGLVQAGGSLRLSCAASGGTLSKNTVAWVRQAPGKERGFVTSITCDGRTTYYANSVNGRFPINRNNAENLVVLQMNSLKPDDTALYYCAAYRKSIMSIQPDYWGQGTQVTVSSGGGGSGGGGSQVQLVESGGGLVQAGGSLRLSCAASGGTLSKNTVAWFRQAPGKERGFVASITWDGRTTYYADSVKGRFTISRDNAKNTVYLQMNSLKPEDTAVYVCADLGKWPAGPADYWGQGTQVTVSS

SEQ ID NO: 3768 - protein, 256 aa, synthetic construct; identical to SEQ ID NO: 3765

SEQ ID NO: 3769 - protein, 261 aa, synthetic construct
QVKLEESGGGLVQAGGSLRLSCAASGGTLSKNTVAWVRQAPGKERGFVTSITCDGRTTYYANSVNGRFPINRNNAENLVVLQMNSLKPDDTALYYCAAYRKSIMSIQPDYWGQGTQVTVSSGGGGSGGGGSGGGGSGGGGSQVQLVESGGGLVQAGGSLRLSCAASGGTLSKNTVAWFRQAPGKERGFVASITWDGRTTYYADSVKGRFTISRDNAKNTVYLQMNSLKPEDTAVYVCADLGKWPAGPADYWGQGTQVTVSS

SEQ ID NO: 3770 - protein, 245 aa, synthetic construct
QVQLVESGGGLVQAGGSLRLSCAASGGTLSKNTVAWFRQAPGKERGFVASITWDGRTTYYADSVKGRFTISRDNAKNTVYLQMNSLKPEDTAVYVCADLGKWPAGPADYWGQGTQVTVSSGGGGSDVQLVESGGGLVQAGGSLRLSCAASGGTLSKNTVAWVRQAPGKERGFVTSITCDGRTTYYANSVKGRFPISRDNAENTVYLQMNSLKPEDTAGYVCADLGKWPAGSADYWGQGTHVTVSS

SEQ ID NO: 3771 - protein, 255 aa, synthetic construct
QVQLVESGGGLVQAGGSLRLSCAASGGTLSKNTVAWFRQAPGKERGFVASITWDGRTTYYADSVKGRFTISRDNAKNTVYLQMNSLKPEDTAVYVCADLGKWPAGPADYWGQGTQVTVSSGGGGSGGGGSGGGGSDVQLVESGGGLVQAGGSLRLSCAASGGTLSKNTVAWVRQAPGKERGFVTSITCDGRTTYYANSVKGRFPISRDNAENTVYLQMNSLKPEDTAGYVCADLGKWPAGSADYWGQGTHVTVSS

SEQ ID NO: 3772 - protein, 265 aa, synthetic construct
QVQLVESGGGLVQAGGSLRLSCAASGGTLSKNTVAWFRQAPGKERGFVASITWDGRTTYYADSVKGRFTISRDNAKNTVYLQMNSLKPEDTAVYVCADLGKWPAGPADYWGQGTQVTVSSGGGGSGGGGSGGGGSGGGGSGGGGSDVQLVESGGGLVQAGGSLRLSCAASGGTLSKNTVAWVRQAPGKERGFVTSITCDGRTTYYANSVKGRFPISRDNAENTVYLQMNSLKPEDTAGYVCADLGKWPAGSADYWGQGTHVTVSS

SEQ ID NO: 3773 - protein, 250 aa, synthetic construct
QVQLVESGGGLVQAGGSLRLSCAASGGTLSKNTVAWFRQAPGKERGFVASITWDGRTTYYADSVKGRFTISRDNAKNTVYLQMNSLKPEDTAVYVCADLGKWPAGPADYWGQGTQVTVSSGGGGSGGGGSDVQLVESGGGLVQAGGSLRLSCAASGGTLSKNTVAWVRQAPGKERGFVTSITCDGRTTYYANSVKGRFPISRDNAENTVYLQMNSLKPEDTAGYVCADLGKWPAGSADYWGQGTHVTVSS

SEQ ID NO: 3774 - protein, 255 aa, synthetic construct; identical to SEQ ID NO: 3771

SEQ ID NO: 3775 - protein, 260 aa, synthetic construct
QVQLVESGGGLVQAGGSLRLSCAASGGTLSKNTVAWFRQAPGKERGFVASITWDGRTTYYADSVKGRFTISRDNAKNTVYLQMNSLKPEDTAVYVCADLGKWPAGPADYWGQGTQVTVSSGGGGSGGGGSGGGGSGGGGSDVQLVESGGGLVQAGGSLRLSCAASGGTLSKNTVAWVRQAPGKERGFVTSITCDGRTTYYANSVKGRFPISRDNAENTVYLQMNSLKPEDTAGYVCADLGKWPAGSADYWGQGTHVTVSS

SEQ ID NO: 3776 - protein, 42 aa, synthetic construct; identical to SEQ ID NO: 3544
